(19) United States
(12) Patent Application Publication
(10) Pub. No.: US 2009/0226403 A1
(43) Pub. Date: Sep. 10, 2009

(54) Olfactory and pheromones G-protein coupled receptors

(75) Inventor: Alex Veithen, Genappe (BE)

Correspondence Address: Edwards Angell Palmer & Dodge LLP, 111 HUNTINGTON AVENUE, BOSTON, MA, 02199, US

(73) Assignee: CHEMCOM S.A.

(21) Appl. No.: 11/796,321

(22) Filed: Apr. 26, 2007

Related U.S. Application Data
(63) Continuation of application No. 10/387,629, filed on Mar. 13, 2003, now abandoned.
Application No. 10/387,629 is a continuation-in-part of application No. PCT/BE01/00162, filed on Sep. 21, 2001.

(30) Foreign Application Priority Data
Sep. 22, 2000 (EP) 00870211.0

(51) Int. Cl. A61K 35/12; C07K 14/00; C12N 15/11; C12N 15/00; C12N 5/06; A01K 67/027; G01N 33/53; A61K 31/7088; A61K 38/16

(52) U.S. Cl. 424/93.21; 530/350; 536/23.5; 435/320.1; 435/325; 800/13; 435/7.21; 514/44 R; 514/12

(57) ABSTRACT

The present invention is related to an olfactory or pheromone G-protein coupled receptor having an amino acid sequence which presents 95% sequence identity with the sequence SEQ ID NO. 1.

### PRIORITY

[0001] This application is a Continuation of U.S. application Ser. No. 10/387,629, filed Mar. 13, 2003, which is a continuation-in-part of International Application number PCT/BE01/00162, filed Sep. 21, 2001, which claims priority to European application number 00870211.0, filed Sep. 22, 2000. The entirety of each of the foregoing is incorporated by reference herein in its entirety.

### FIELD OF THE INVENTION

[0002] The present invention is related to newly identified, isolated and purified members of the family of olfactory ligand and the family of pheromone ligand G-protein-coupled receptors (preferably human) as well as to the various uses that can be made of said receptors.

[0003] The invention is also related to the polynucleotides sequences encoding the pheromone receptors of the invention.

[0004] The invention is further related to methods using receptor polypeptides and polynucleotides applicable to diagnostic and treatment in receptor-mediated disorders.

[0005] The invention is further related to ligand-screening methods using the receptor polypeptides and polynucleotides, to identify agonists and antagonists useful to improve flavors or perfumes. Ligands of the pheromone receptors of the invention may also be used in the prevention and/or treatment of various disorders.

[0006] The invention further encompasses agonists and antagonists based on the said olfactory and pheromones receptor polypeptides and polynucleotides as well as biosensors comprising said receptor polypeptides.

[0007] The invention is further related to procedures for producing the receptor polypeptides and polynucleotides according to the invention, preferably by genetic recombinant methods.

### BACKGROUND OF THE INVENTION

[0008] G-protein coupled receptors (GPCRs) are proteins responsible for transducing a signal within a cell. GPCRs have usually seven transmembrane domains. Upon binding of a ligand to an extra-cellular portion or fragment of a GPCR, a signal is transduced within the cell that results in a change in a biological or physiological property or behaviour of the cell. GPCRs, along with G-proteins and effectors (intracellular enzymes and membrane channels modulated by G-proteins), are the components of a modular signaling system that connects the state of intra-cellular second messengers to extra-cellular inputs.

[0009] GPCR genes and gene products are potential causative agents of disease and these receptors seem to be of critical importance to both the central nervous system and peripheral physiological processes.

[0010] The GPCR protein superfamily is represented in five families: Family I, receptors typified by rhodopsin and the beta2-adrenergic receptor and currently represented by over 200 unique members; Family II, the parathyroid hormone/calcitonin/secretin receptor family; Family III, the metabotropic glutamate receptor family, Family IV, the CAMP receptor family, important in the chemotaxis and development of D. discoideum; and Family V, the fungal mating pheromone receptor such as STE2.

[0011] G proteins represent a family of heterotrimeric proteins composed of α, β, and γ subunits, that bind guanine nucleotides. These proteins are usually linked to cell surface receptors (receptors containing seven transmembrane domains).

[0012] Following ligand binding to the GPCR, a conformational change is transmitted to the G protein, which caused the α-subunit to exchange a bound GDP molecule for a GTP molecule and to dissociate from the βγ-subunits.

[0013] The GTP-bound form of the α, β and γ-subunits typically functions as an effector-modulating moiety, leading to the production of second messengers, such as cAMP (e.g. by activation of adenyl cyclase), diacylglycerol or inositol phosphates.

[0014] Greater than 20 different types of α-subunits are known in humans. These subunits associate with a small pool of β and γ subunits. Examples of mammalian G proteins include Gi, Go, Gq, Gs and Gt. G proteins are described extensively in Lodish et al., Molecular Cell Biology, (Scientific American Books Inc., New York, N.Y., 1995), the contents of which are incorporated herein by reference.

[0015] Known and unknown GPCRs constitute now major targets for drug action and development.

[0016] More than 300 GPCRs have been cloned thus far and it is generally assumed that it exists well over 1000 such receptors. Mechanistically, approximately 50-60% of all clinically relevant drugs act by modulating the functions of various GPCRs (Cudermann et al., J. Mol. Med., Vol. 73, pages 51-63, 1995).

### SUMMARY OF THE INVENTION

[0017] The present invention is related to newly isolated and purified identified members of olfactory and pheromone GPCRs (SEQ ID NO. 1 to SEQ. ID NO. 254) as well as to polynucleotide sequences, including recombinant sequences, encoding said receptors, described hereafter.

[0018] The present invention is also related to nucleotide and/or amino acid sequences homologous to the sequences corresponding to the receptors described hereafter.

[0019] Homologous sequences mean sequences which present a high sequence identity (which present an identity higher than 75%, 80%, 85%, 90% or 95%) with the complete sequence described hereafter.

[0020] Homologous sequences of a sequence according to the invention may include an amino acid or nucleotide sequence encoding a similar receptor which exists in other animal species (rat, mouse, cat, dog, etc.) or in specific human population groups, but which are involved in the same biochemical pathway(s).

[0021] Such homologous sequences may comprise additions, deletions or substitutions of one or more amino acids or nucleotides, which do not substantially alter the functional characteristics of the receptor according to the invention. For example, homologs of GPCRs of the present invention will have at least 90% of the activity of wild-type full length human olfactory and/or pheromone GPCRs of the invention.

[0022] Such homologous sequences can also be nucleotide sequences of more than 400, 600, 800 or 1000 nucleotides which are able to hybridize to the complete nucleic acid sequences of SEQ ID Nos.: 1-254 under stringent hybridization conditions (such as the ones described by SAMBROOK et al., Molecular Cloning, Laboratory Manuel, Cold Spring, Harbor Laboratory press, New York). An example of “stringent hybridization conditions” is as follows: hybridize in 50% formamide, 5×SSC, 50 mM sodium phosphate (pH 6.8), 0.1% sodium pyrophosphate, 5×Denhardt's solution, 50 μg/ml sonicated salmon sperm DNA, 0.1% SDS and 10% dextran sulfate at 42° C.; and wash at 42° C. (or higher, e.g., up to two degrees C. below the Tₘ of the perfect complement of the probe sequence) in 0.2×SSC and 0.1% SDS.

[0023] Another aspect of the present invention is related to a specific active portion of said sequences or a libraries of active portions of these sequences. Active portions could be partial or deleted receptors which comprise modifications (e.g., point mutations) or deletions upon the complete nucleotide or amino acid sequences and which still maintain the active site(s) necessary for the binding of a specific ligand able to interact with said receptors.

[0024] As used herein, an “active portion” refers to a portion of a sequence that is of sufficient size to exhibit normal or near normal pharmacology (e.g., receptor activity, the response to an activator or inhibitor, or ligand binding are at least 90% of the level of activity, response, or binding exhibited by a wild type receptor). “A portion” as it refers to a sequence encoding a receptor, refers to less than 100% of the sequence (i.e., 99, 90, 80, 70, 60, 50% etc. . . . ). The active portion could be a receptor which comprises a partial deletion of the complete nucleotide or amino acid sequence and which still maintains the active site(s) and protein domain(s) necessary for the binding of and interaction with a specific ligand.

[0025] Homologous sequences of the sequences according to the invention may comprise similar receptors which exist in other animal (vertebrates, preferably mammalian) or specific human populations, but which are involved in the same biochemical pathway.

[0026] Such homologous sequences may comprise addition, deletion or substitution of one or more amino acids or nucleotides, which does not substantially alter the functional characteristics of the receptor(s) according to the invention in order to form preferably a hybrid polypeptide with another transmembrane protein, suitable for rapid ligand screening.

[0027] Thus, the invention encompasses also a receptor and corresponding nucleotide sequence which may be derived from olfactory neurons or olfactory epithelium, having exactly the same amino acid or nucleotide sequences as shown in the enclosed sequence listing (SEQ ID Nos 1-254).

[0028] The invention is preferably related to human receptors characterized by the complete nucleotide and amino acid sequences described hereafter, agonist and antagonist compounds or inhibitors, and antibodies or specific hypervariable portions thereof that bind specifically to the receptors (i.e. that have at least a 10 fold greater affinity for said receptors than any other naturally occurring antibody). The invention relates, with particularity to antibodies made by a process comprising the injection of a pharmaceutically acceptable preparation of an amino acid sequence of a receptor according to the invention (or an active portion thereof) into a animal capable of producing antibodies directed against said receptor. Alternatively, antibody polypeptide molecules may be generated by injecting an animal with a DNA expression vector comprising a nucleic acid sequence encoding a receptor polypeptide of the invention, and appropriate control sequences, such that upon expression of the receptor, an immune response is raised in the host animal, thereby generating antibody polypeptide molecules to the receptor polypeptide.

[0029] For instance, a monoclonal antibody to the receptor according to the invention may be obtained by injecting an expression plasmid comprising the DNA encoding said receptor into a non-human mammal and than fusing mouse spleen cells with myeloma cells.

[0030] The present invention is also related to a polynucleotide molecule encoding an olfactory and/or pheromone receptor polypeptide according to the invention, possibly linked to other expression sequences and incorporated into a vector (e.g., plasmid, virus such as an adenovirus, liposomes, cationic vesicles). The invention also relates to host cells transformed by such a vector.

[0031] The present invention is also related to the recombinant, preferably human, receptor according to the invention, produced by such host cells according to the methods well known by the person skilled in the art.

[0032] The present invention is also related to a transgenic non human mammal comprising a partial or total deletion of the genetic sequences encoding the receptor according to the invention, preferably a non human mammal comprising an homologous recombination “knock-out” of the nucleotide sequences (polynucleotides) according to the invention or a transgenic non human mammal overexpressing above natural level said nucleotide sequences (polynucleotides).

[0033] A transgenic non human mammal can be obtained by methods well known by the person skilled in the art, for instance by the one described in the document WO98/20112 using classical techniques based upon the transfection of embryonic stem cells, preferably according to the method described by Carmeliet et al., Nature, Vol. 380, p. 435-439, 1996.

[0034] Preferably, a transgenic non-human mammal overexpressing the polynucleotides according to the invention or portions thereof comprises the polynucleotides or active portions thereof incorporated in a DNA construct with an inducible promoter allowing its overexpression and possibly tissues and other specific regulatory elements.

[0035] As used herein. “overexpress” refers to a level that is at least 2-fold, preferably 5-fold, more preferably 10-fold and most preferably 100-fold or more (i.e., 150-fold, 200-fold, 250-fold, 500-fold, 1000-fold, 10,000-fold etc.) as compared to the level of expression of the endogenous receptor in its normal native context. A transgenic non-human mammal according to the invention will express the transgene in at least one tissue or cell type but can express a transgene (e.g., a transgene encoding a pheromone receptor of the present invention) in all tissues and cells.

[0036] Another aspect of the present invention is related to a method for screening for compounds which bind to the receptor polypeptide molecules according to the invention, said method comprising providing a cell containing a nucleic acid molecule encoding an olfactory/pheromone receptor of the invention or a portion thereof and expressing the receptor or portion thereof; exposing said cell to a candidate compound; and detecting the presence of a compound bound to said receptor or portion thereof, thereby determining whether said compound binds to said receptor or portion thereof.

[0037] In one embodiment, the method further comprises the step of preparing a cell extract from the cell transfected with said nucleic acid molecule, isolating a membrane fraction of the cell extract, and contacting the candidate compound with the membrane fraction under conditions permitting binding of the compound to said fraction.

[0038] In a further embodiment, the invention comprises isolating and/or recovering the candidate compound which binds to the receptor.

[0039] The present invention provides further, a method for identifying a compound as a ligand, agonist, or antagonist of a GPCR according to the invention comprising; providing a cell containing a nucleic acid molecule encoding an olfactory/pheromone receptor of the invention or a portion thereof and expressing the receptor or portion thereof; exposing said cell to a candidate compound; and detecting a signaling activity of the receptor or portion thereof, wherein if a signaling activity is detected, then the candidate compound is identified as a ligand, agonist, or antagonist of the GPCR.

[0040] In a further embodiment, the invention comprises isolating and/or recovering the candidate compound which is a ligand of a receptor of the invention and which is identified by the above method.

[0041] As used herein, an “antagonist” is a ligand which competitively binds to a receptor at the same site as an agonist, but does not activate an intracellular response initiated by an active form of the receptor. An antagonist thereby inhibits the intracellular response induced by an agonist by at least 10%, preferably 15-25%, more preferably 25-50% and most preferably, 50-100%, as compared to the intracellular response in the presence of an agonist and in the absence of an antagonist.

[0042] As used herein, an “agonist” refers to a ligand that activates an intracellular response when it binds to a receptor at concentrations equal to or lower than angiopeptin concentrations which induce an intracellular response. An agonist according to the invention can increase the intracellular response mediated by a receptor by at least 2-fold, preferably 5-fold, more preferably 10-fold and most preferably 100-fold or more (i.e., 150-fold, 200-fold, 250-fold, 500-fold, 1000-fold, 10,000-fold etc. . . . ), as compared to the intracellular response in the absence of agonist. An agonist according to the invention may decrease internalization of a cell surface receptor such that the cell surface expression of a receptor is increased by at least 2-fold, preferably 5-fold, more preferably 10-fold and most preferably, 100-fold or more (i.e., 150-fold, 200-fold, 250-fold, 500-fold, 1000-fold, 10,000-fold etc. . . . ), as compared to the number of cell surface receptors present on the surface of a cell in the absence of an agonist. In another embodiment of the invention, an agonist stabilizes a cell surface receptor and increases the cell surface expression of a receptor by at least 2-fold, preferably 5-fold, more preferably 10-fold and most preferably, 100-fold or more (i.e., 200-fold, 250-fold, 500-fold, 1000-fold, 10,000-fold etc. . . . ), as compared to the number of cell surface receptors present on the surface of a cell in the absence of agonist.

[0043] An “inhibitor” compound according to the invention is a molecule directed against the receptor or against the natural ligand for the receptor that decreases the binding of the ligand to the receptor by at least 10%, preferably 15-25%, more preferably 25-50% and most preferably, 50-100%. An “inhibitor” compound of the invention can decrease the intracellular response induced by an agonist by at least 10%, preferably 15-25%, more preferably 25-50% and most preferably, 50-100%. An “inhibitor” also refers to a nucleotide sequence encoding an inhibitor compound of the invention.

[0044] As used herein, the term “receptor signaling activity” refers to the initiation or propagation of signaling by an olfactory/pheromone receptor polypeptide of the invention. Receptor signaling activity is monitored by measuring a detectable step in a signaling cascade by assaying one or more of the following: stimulation of GDP for GTP exchange on a G protein; alteration of adenylate cyclase activity; protein kinase C modulation; phosphatidylinositol breakdown (generating second messengers diacylglycerol, and inositol triphosphate); intracellular calcium flux; activation of MAP kinases; modulation of tyrosine kinases; or modulation of gene or reporter gene activity. A detectable step in a signaling cascade is considered initiated or mediated if the measurable activity is altered by 10% or more above or below baseline. The measurable activity can be measured directly, as in, for example, measurement of cAMP or diacylglycerol levels. Alternatively, the measurable activity can be measured indirectly, as in, for example, a reporter gene assay.

[0045] As used herein, “ligand” refers to a moiety that is capable of associating or binding to a receptor. According to the method of the invention, a ligand and a receptor have a binding constant that is sufficiently strong to allow detection of binding by an assay method that is appropriate for detection of a ligand binding to a receptor (e.g. a second messenger assay to detect an increase or decrease in the production of a second messenger in response to ligand binding to the receptor, a binding assay to measure protein-ligand binding or an immunoassay to measure antibody-antigen interactions). A ligand according to the invention includes the natural ligand that binds a receptor, or a ligand may be any nucleotide, antibody, antigen, enzyme, peptide, polypeptide or nucleic acid capable of binding to the receptor. According to the method of the invention, a ligand and receptor specifically bind to each other (e.g. via covalent or hydrogen bonding or via an interaction between, for example, a protein and a ligand, an antibody and an antigen or protein subunits). Specifically, a ligand according to the invention includes an odorant, flavor, or pheromone.

[0046] As used herein, the terms “change”, “difference”, “decrease”, or “increase” as applied to e.g., binding or signaling activity or amount of a substance refer to an at least 10% increase or decrease in binding, signaling activity, or for example, level of mRNA, polypeptide or ligand relative to a standard in a given assay.

[0047] As used herein, the “second messenger assay” preferably comprises the measurement of guanine nucleotide binding or exchange, adenylate cyclase, intra-cellular cAMP, intracellular inositol phosphate, intra-cellular diacylglycerol concentration, intracellular calcium concentration (e.g., via an aequorin based assay), arachinoid acid concentration, MAP kinase(s) or tyrosine kinase(s), protein kinase C activity, or reporter gene expression according to methods known in the art and defined herein.

[0048] As used herein, the term “second messenger” refers to a molecule, generated or caused to vary in concentration by the activation of a G-Protein Coupled Receptor, that participates in the transduction of a signal from that GPCR. Non-limiting examples of second messengers include cAMP, diacylglycerol, inositol triphosphate, arachidonic acid release, inositol triphosphates and intracellular calcium. The term “change in the level of a second messenger” refers to an increase or decrease of at least 10% in the detected level of a given second messenger relative to the amount detected in an assay performed in the absence of a candidate modulator.

[0049] As used herein, the term “binding” refers to the physical association of a ligand (e.g., angiopeptin, or an antibody) with a receptor (e.g., pheromone GPCR). As the term is used herein, binding is “specific” if it occurs with an EC₅₀ or a K_{d} of 1 mM less, generally in the range of 1 mM to 10 nM. For example, binding is specific if the EC₅₀ or K_{d} is 1 mM, 500 μM, 100 μM, 10 μM, 9.5 μM, 9 μM, 8.5 μM, 8 μM, 7.5 μM, 7 μM, 6.5 μM, 6 μM, 5.5 μM, 5 μM, 4.5 μM, 4 μM, 3.5 μM, 3 μM, 2.5 μM, 2 μM, 1.5 μM, 1 μM, 750 nM, 500 nM, 250 nM, 100 nM, or 50 nM or less.

[0050] The present invention is related to molecules or compounds, preferably pheromones, odorants, or flavors, including possible toxic molecules identified by the screening methods of the invention and to their pharmaceutical, cosmetic and industrial (e.g., production of detergents, soap, shampoo, fragrances, odorant fingerprints, appetite suppressant compounds, etc.) use.

[0051] Such molecules or compounds may be used also for modifying taste and/or physiological reactions to odorant, pheromones or flavors in a mammal.

[0052] The present invention is also related to a (preferably nasal) spray for controlling appetite comprising the identified compounds or molecules by the method according to the invention in a suitable carrier.

[0053] Another application of such receptor is the trapping of odor by using the receptor, the cell or membrane according to the invention wherein the desired odor ligand is absorbed by the binding of the odorant ligand to the odorant receptor.

[0054] The present invention is further related to an odor trap, using said method for trapping odor.

[0055] Preferably, the tested odorants or pheromones upon the receptor according to the invention are advantageously selected from different body secretions such as sweat, salivary, urine, vaginal secretions, sperm, etc. The tested odorants or pheromones upon the receptor are also advantageously selected from the group of 16-androstene family, such as the 5α-androst-16-en-3α-ol, the 5α-androst-16-en-3-one, androstadienone, a human pheromone described previously (Grosser et al., Psychoneuroendocrinology vol. 25, pages 289-299, 2000) and other androstenol derivatives; the group consisting of estrene family, such as 1,3,5(10),16-estratetraen-3-ol and other estradiol derivatives described in PCT/US92/00219, PCT/US92/00220 and EP0562843; the group consisting of progestin family such as the human pheromone pregna-4,20-diene-3,6-dione (Monti-Bloch et al., J. Steroid Biochem. Mol. Biol. Vol. 65, pages 237-242) and other progesterone derivatives, the group consisting of small fatty acids such as acetic acid, propionic acid, butyric acid, isovaleric acid and isocaproïc acid that compose the putative human vaginal pheromone copulin and such as the trans-3-methyl-2-hexanoïc acid found in human sweat, cyclic organic compounds homologs to known animal pheromone such as dehydro-exo-brevicomin and such as nepetalactone, and human homologs of the murin protein aphrodisin.

[0056] Other examples of such compounds are molecules present in vapour emanating from narcotics, like cocaine, marihuana, heroin, hashish, angel dust, gasoline, natural gas, alcohol, decayed human flesh, explosives, plastic explosives, fire arms, gun powder, toxic fumes, noxious fumes or dangerous fumes, etc.

[0057] Molecules or compounds which bind to and/or activate the receptors of the invention could be used also for promoting or suppressing chemical communication. Compounds which bind to and/or activate the receptor polypeptides of the invention are also useful as emitted stimuli able to modify the probability of response of a first organism or a part of a first organism when released by a second organism or an exogenous source.

[0058] The molecules or compounds of the invention could be used in the treatment or prevention of various disorders affecting, for instance, cell migration, cell death, cell growth, psychotic and neurological disorders, including anxiety, schizophrenia, maniac depression, depression or mound modification, etc.

[0059] As used herein, a “therapeutic amount” of a compound is an amount that, when contacted with a receptor of the present invention, increases or decreases ligand binding to said receptor or activation of said receptor by at least 10%, preferably 20%, 30%, 50% and up to 100%.

[0060] The receptors and/or ligands of the invention could be used also for improving contraceptive medication, treatment promoting axonal growth, neural connection and nerves regeneration, in modulating male and female endocrine functions, or may effect the menstrual cycle. Indeed, it is known that several of said receptors can be present at the surface of spermatozoids and can then find contraceptive application or could be used in the treatment/prevention of sterility/fertility. these receptors are also present in various neurolfactory neurons and can improve their connection, especially upon the olfactory bulb or upon other tissue comprising said olfactory receptors.

[0061] Receptors and/or ligands of the invention could be also used for the treatment or the prevention of various animal or human behaviours, such as stimulation and/or suppression of appetite, stimulation and/or suppression of motivation and sexual attraction, stimulation and/or suppression of aggressivity, stimulation and/or suppression of alarm and defense behaviours, stimulation and/or suppression of territory and trail-marking, stimulation and/or suppression of social regulation and recognition, stimulation and/or suppression of mother-child recognition, etc.

[0062] The screening method according to the invention could be performed by well known methods to the person skilled in the art, preferably high-throughput screening, diagnostic and dosage devices based upon the method described in the International patent application WO00/02045 performed upon various solid supports such as micro-titer plates or biochips according to known techniques by the person skilled in the art.

[0063] Methods for screening for the binding of a candidate compound to a receptor molecule of the invention may be performed by several techniques which are known to those of skill in the art including, but not limited to surface plasmon resonance (Salamon et al., 1996, Biophys J. 71: 283-294; Salamon et al., 2001, Biophys. J. 80: 1557-1567; Salamon et al., 1999, Trends Biochem. Sci. 24: 213-219; Sarrio et al., 2000, Mol. Cell. Biol. 20: 5164-5174), or FRET.

[0064] Methods for screening for receptor signaling activity are also known to those of skill in the art and include, but are not limited to GTPase/GTP binding assays (Traynor and Nahorski, 1995, Mol. Pharmacol. 47: 848-854), aequorin assays which measure the response of mitochondrial apoaequorin to intracellular calcium release induced by the activation of GPCRs (Stables et al., 1997, Anal. Biochem. 252:115-126; Detheux et al., 2000, J. Exp. Med., 192 1501-1508), adenylate cyclase assays (Kenimer & Nirenberg, 1981, Mol. Pharmacol. 20: 585-591), cAMP assay (Horton & Baxendale, 1995, Methods Mol. Biol. 41: 91-105), assays for PLC breakdown and DAG/inositol triphosphate (IP₃) production)(Phospholipid Signaling Protocols, edited by Ian M. Bird. Totowa, N.J., Humana Press, 1998; Rudolph et al., 1999, J. Biol. Chem. 274: 11824-11831), PKC activation assay (Kikkawa et al., 1982, J. Biol. Chem. 257: 13341), kinase assays, transcriptional reporter assays, or other functional assays include, for example, microphysiometer or biosensor assays (Hafner, 2000, Biosens. Bioelectron. 15: 149-158).

[0065] The present invention is also related to the molecules characterized and possibly recovered by said method, including the pharmaceutical composition comprising a sufficient amount of said molecules and a pharmaceutically acceptable carrier or diluent for the preparation of a medicament in the prevention and/or the treatment of specific diseases.

[0066] A last aspect of the present invention is related to a biosensor or any technical device comprising the receptors according to the invention for the detection of the specific above-mentioned compounds or molecules.

1. An isolated polynucleotide encoding a G-protein coupled receptor, said polynucleotide sequence comprising a sequence selected from the group consisting of SEQ ID NOs 23, 47, 157, 179, and 253.

2. An isolated G-protein coupled receptor comprising an amino acid sequence selected from the group consisting of SEQ ID NO: 24, 48, 158, 180, and 254.

3. An isolated polynucleotide encoding the G-protein coupled receptor of claim 2.

4. A vector comprising the polynucleotide according to claim 1.

5. A cell comprising the vector according to the claim 4.

6. A non-human mammal comprising a deletion of the polynucleotide according to the claim 1.

7. The non-human mammal of claim 6 wherein said animal is preferably a non-human mammal.

8. A transgenic non-human mammal which overexpresses the polynucleotide of claim 1.

9. A method for screening for compounds which bind to a G-protein coupled receptor, said method comprising
providing a cell comprising the isolated polynucleotide of claim 1 and expressing the encoded G-protein coupled receptor or portion thereof;
exposing said cell to a candidate compound; and
detecting the presence of said compound bound to said receptor or portion thereof, thereby determining whether said compound binds to said receptor or portion thereof.

10. The method of claim 9, further comprising the steps of preparing a cell extract from the cell transfected with said nucleic acid molecule; isolating a membrane fraction of the cell extract; and contacting the candidate compound with the membrane fraction under conditions permitting binding of the compound to said fraction.

11. The method of claim 9, further comprising the step of isolating and/or recovering the candidate compound which binds to the receptor.

12. A method for identifying a compound as a ligand, agonist, or antagonist of a G-protein coupled receptor comprising;
providing a cell comprising the polynucleotide of claim 1 and expressing the encoded G-protein coupled receptor or portion thereof;
exposing said cell to a candidate compound; and
detecting a signaling activity of the receptor or portion thereof, wherein if a signaling activity is detected, then the candidate compound is identified as a ligand, agonist, or antagonist of the G-protein coupled receptor.

13. The method of claim 12, wherein following detection of a signaling activity, said candidate compound is isolated and/or recovered.

14. A pharmaceutical composition comprising an adequate pharmaceutical carrier and a therapeutic amount of the polynucleotide according to claim 1.

15. A pharmaceutical composition comprising an adequate pharmaceutical carrier and a therapeutic amount of the G-protein coupled receptor of claim 2.

16. A pharmaceutical composition comprising an adequate pharmaceutical carrier and a therapeutic amount of the vector according to the claim 5.

17. A pharmaceutical composition comprising an adequate pharmaceutical carrier and a therapeutic amount of the cell according to the claim 6.

The application's sequence listing, which the Patent Office published only in electronic form, follows.

SEQUENCE LISTING (254 sequences)

SEQ ID NO: 1 - DNA, 1074 bp, Homo sapiens
  CDS (1)..(1071)
atgttgaaattggttattattgagaacatggcagaaattatgctattctcattagatctcttgcttttctccacagatatcctttgctttaattttccttctaagatgatcaaacttcctggttttattaccatacaaatcttcttttatccacaagccagctttggaatttcagcaaacaccatccttcttctttaccacatcttcacctttgttttcagtcacaggtctaagtccattgacatgataattagtcacctgtctctcatccacatactgctgctcttcactcaggcaatattggtgtccttagacttctttggttcacagaatactcaggatgatcttaggtataaggtcattgtctttttaaacaaggtgatgaggggcctctccatctgcaccccctgcctcctgagtgtgctccaggccatcatcagccccagcatcttctccttggcaaagctcaaacatccttctgcaagtcacatcttaggattcttccttttctcatgggtcctcaacatgttcattggtgtaatcttctgctgtacactgcggctacccccagtgaaacggggccagtcttctgtttgtcatacagcactgttcctttttgcccatgagctacacccacaggagactgtttttcacactaatgactttgagggatgtcacctttatagggttcatggtcctctcaagaggctacatggtgattattttatacagacaataagaggctatctcagtgccttcacacagccagcctgtccccgagtctcaccagtgaaaagagcctcccaggctatcttactgctggtgagttttgtcttcacatactgggtggactttacgttctcattttcaggaggtgtgacatggataaatgattctctgctagtgtggctccaggttattgtggccaatagctatgccgcaattagtcctttgatgctaatttatgctgataaccaaatattcaagactctgcaaatgttatggtttaaatatttgtctcctccaaagctcatgttgaaatttaatcgccaatgtggcagtactaagaagtga

SEQ ID NO: 2 - protein, 357 aa, Homo sapiens [sequence omitted]

SEQ ID NO: 3 - DNA, 906 bp, Homo sapiens
  CDS (1)..(903)
atggcctcccggtatgtggcagtgggaatgatcttatcacagaccgtggtgggagtcctggggagcttctctgttcttctccattatctctccttttactgcactgggtgcaggttaaggtccacagatttgattgttaagcacctgattgtagccaacttcttagctctccgctgtaaaggagtcccccagacaatggcagcttttggggttagatattttctcaatgctcttgggtgcaaacttgttttctatctccatagagtgggcaggggagtgtccattggcaccacctgcctcttgagtgtcttccaggtgatcacggtcagctccaggaaatccaggtgggcaaaacttaaagagaaagcccccaagcatgttggcttttctgttctcctgtgctggatcgtgtgcatgttggtaaacatcatctttcccatgtatgtgactggcaaatggaactacacaaacatcacagtgaacgaggatttgggatactgttctgggggaggcaacaacaaaatcgcacagacactgcgtgcaatgttgttatcattccctgatgtgttgtgtctggggctcatgctctgggtcagcagctccatggtttgcatactgcacaggcacaagcagcgggtccagcacattgataggagcaatctctcccccagagcctccccagagaacagagctacgcagagcatcctcatcctggtgagcacctttgtgtcttcttacactctctcctgccttttccaagtttgtatggctcttttggataatcccaatagtttactggtgaacacttcagccttaatgagtgtatgtttcccaactctcagcccctttgttctcatgagctgtgaccccagtgtatacaggttttgttttgcctggaaaagatga

SEQ ID NO: 4 - protein, 301 aa, Homo sapiens
MASRYVAVGMILSQTVVGVLGSFSVLLHYLSFYCTGCRLRSTDLIVKHLIVANFLALRCKGVPQTMAAFGVRYFLNALGCKLVFYLHRVGRGVSIGTTCLLSVFQVITVSSRKSRWAKLKEKAPKHVGFSVLLCWIVCMLVNIIFPMYVTGKWNYTNITVNEDLGYCSGGGNNKIAQTLRAMLLSFPDVLCLGLMLWVSSSMVCILHRHKQRVQHIDRSNLSPRASPENRATQSILILVSTFVSSYTLSCLFQVCMALLDNPNSLLVNTSALMSVCFPTLSPFVLMSCDPSVYRFCFAWKR

SEQ ID NO: 5 - DNA, 981 bp, Homo sapiens
  CDS (1)..(978)
atgtgtcccttgaccttgcaggtcactggcctaatgaatgtctctgagccaaattccagctttgcttttgtaaatgaatttatactccaaggtttctcttgtgagtggacaattcagatcttcctcttctcactctttactacaacatatgcactgactataacagggaatggagccattgcttttgtcctgtggtgtgaccggcgacttcacactcccatgtacatgttcctgggaaatttctcctttttagagatatggtatgtctcttctacagttcccaagatgttggtcaacttcctttcagagaaaaaaaacatctcctttgctggatgttttctccagttttatttcttcttctctttgggtacatcagaatgcttgcttttgactgtgatggcctttgatcagtaccttgctatctgccgtcccttgctctatcctaatatcatgactgggcatctctatgccaaactggtcatactgtgctgggtttgtggatttctgtggttcctgatccccattgttctcatctctcagatgcccttctgtggcccaaacattattgaccatgttgtgtgtgacccagggccacgatttgcattggattgtgtttctgccccaagaatccaactgttttgctacactctaagctcattagttatttttggtaacttcctctttattattggatcctatactcttgtcctgaaagctatgttgggtatgccttcaagcactgggagacataaggccttctctacctgtgggtctcatttggctgtggtatcactgtgctatagctctcttatggtcatgtatgtgagcccaggactcggacattctacagggatgcagaaaattgaaactttgttctatgctatggtgaccccactcttcaatccccttatctatagcctccagaataaggagataaaggcagccctgaggaaagttctggggagttccaacataatctaa

SEQ ID NO: 6 - protein, 326 aa, Homo sapiens
MCPLTLQVTGLMNVSEPNSSFAFVNEFILQGFSCEWTIQIFLFSLFTTTYALTITGNGAIAFVLWCDRRLHTPMYMFLGNFSFLEIWYVSSTVPKMLVNFLSEKKNISFAGCFLQFYFFFSLGTSECLLLTVMAFDQYLAICRPLLYPNIMTGHLYAKLVILCWVCGFLWFLIPIVLISQMPFCGPNIIDHVVCDPGPRFALDCVSAPRIQLFCYTLSSLVIFGNFLFIIGSYTLVLKAMLGMPSSTGRHKAFSTCGSHLAVVSLCYSSLMVMYVSPGLGHSTGMQKIETLFYAMVTPLFNPLIYSLQNKEIKAALRKVLGSSNII

SEQ ID NO: 7 - DNA, 945 bp, Homo sapiens
  CDS (1)..(942)
atgggtgtaaaaaaccattccacagtgactgagtttcttctttcaggattaactgaacaagcagagcttcagctgcccctcttctgcctcttcttaggaatttacacagttactgtggtgggaaacctcagcatgatctcaattattaggctgaatcgtcaacttcatacccccatgtactatttcctgagtagtttgtcttttttagatttctgctattcttctgtcattacccctaaaatgctatcagggtttttatgcagagatagatccatctcctattctggatgcatgattcagctgttttttttctgtgtttgtgttatttctgaatgctacatgctggcagccatggcctgcgatcgctacgtggccatctgcagcccactgctctacagggtcatcatgtcccctagggtctgttctctgctggtggctgctgtcttctcagtaggtttcactgatgctgtgatccatggaggttgtatactcaggttgtctttctgtggatcaaacatcattaaacattatttctgtgacattgtccctcttattaaactctcctgctccagcacttatattgatgagcttttgatttttgtcattggtggatttaacatggtggccacaagcctaacaatcattatttcatatgcttttatcctcaccagcatcctgcgcatccactctaaaaagggcaggtgcaaagcgtttagcacctgtagctcccacctgacagctgttcttatgttttatgggtctctgatgtccatgtatctcaaacctgcttctagcagttcactcacccaggagaaagtatcctcagtattttataccactgtgattctcatgttgaatcccttgatatatagtctgaggaacaatgaagtaagaaatgctctgatgaaacttttaagaagaaaaatatctttatctccaggataa

SEQ ID NO: 8 - protein, 314 aa, Homo sapiens
MGVKNHSTVTEFLLSGLTEQAELQLPLFCLFLGIYTVTVVGNLSMISIIRLNRQLHTPMYYFLSSLSFLDFCYSSVITPKMLSGFLCRDRSISYSGCMIQLFFFCVCVISECYMLAAMACDRYVAICSPLLYRVIMSPRVCSLLVAAVFSVGFTDAVIHGGCILRLSFCGSNIIKHYFCDIVPLIKLSCSSTYIDELLIFVIGGFNMVATSLTIIISYAFILTSILRIHSKKGRCKAFSTCSSHLTAVLMFYGSLMSMYLKPASSSSLTQEKVSSVFYTTVILMLNPLIYSLRNNEVRNALMKLLRRKISLSPG

SEQ ID NO: 9 - DNA, 957 bp, Homo sapiens
  CDS (1)..(954)
atgaatccagcaaatcattcccaggtggcaggatttgttctactggggctctctcaggtttgggagcttcggtttgttttcttcactgttttctctgctgtgtattttatgactgtagtgggaaaccttcttattgtggtcatagtgacctccgacccacacctgcacacaaccatgtattttctcttgggcaatctttctttcctggacttttgctactcttccatcacagcacctaggatgctggttgacttgctctcaggcaaccctaccatttcctttggtggatgcctgactcaactcttcttcttccacttcattggaggcatcaagatcttcctgctgactgtcatggcgtatgaccgctacattgccatttcccagcccctgcactacacgctcattatgaatcagactgtctgtgcactccttatggcagcctcctgggtggggggcttcatccactccatagtacagattgcattgactatccagctgccattctgtgggcctgacaagctggacaacttttattgtgatgtgcctcagctgatcaaattggcctgcacagatacctttgtcttagagcttttaatggtgtctaacaatggcctggtgaccctgatgtgttttctggtgcttctgggatcgtacacagcactgctagtcatgctccgaagccactcacgggagggccgcagcaaggccctgtctacctgtgcctctcacattgctgtggtgaccttaatctttgtgccttgcatctacgtctatacaaggccttttcggacattccccatggacaaggccgtctctgtgctatacacaattgtcacccccatgctgaatcctgccatctataccctgagaaacaaggaagtgatcatggccatgaagaagctgtggaggaggaaaaaggaccctattggtcccctggagcacagacccttacattag

SEQ ID NO: 10 - protein, 318 aa, Homo sapiens
MNPANHSQVAGFVLLGLSQVWELRFVFFTVFSAVYFMTVVGNLLIVVIVTSDPHLHTTMYFLLGNLSFLDFCYSSITAPRMLVDLLSGNPTISFGGCLTQLFFFHFIGGIKIFLLTVMAYDRYIAISQPLHYTLIMNQTVCALLMAASWVGGFIHSIVQIALTIQLPFCGPDKLDNFYCDVPQLIKLACTDTFVLELLMVSNNGLVTLMCFLVLLGSYTALLVMLRSHSREGRSKALSTCASHIAVVTLIFVPCIYVYTRPFRTFPMDKAVSVLYTIVTPMLNPAIYTLRNKEVIMAMKKLWRRKKDPIGPLEHRPLH

SEQ ID NO: 11 - DNA, 999 bp, Homo sapiens
  CDS (1)..(996)
atgttagagggtgttgagcatctccttctgctacttcttttgacagatgtgaacagcaaggaactgcaaagtggaaaccagacttctgtgtctcacttcattttggtgggcctgcaccacccaccacagctgggagcgccactcttcttagctttccttgtcatctatctcctcactgtttctggaaatgggctcatcatcctcactgtcttagtggacatccggctccatcgtcccatgtgcttgttcctgtgtcacctctccttcttggacatgaccatttcttgtgctattgtccccaagatgctggctggctttctcttgggtagtaggattatctcctttgggggctgtgtaatccaactattttctttccatttcctgggctgtactgagtgcttcctttacacactcatggcttatgaccgtttccttgccatttgtaagcccttacactatgctaccatcatgacccacagagtctgtaactccctggctttaggcacctggctgggagggactatccattcacttttccaaacaagttttgtattccggctgcccttctgtggccccaatcgggtcgactacatcttctgtgacattcctgccatgctgcgtctagcctgcgccgatacggccatcaacgagctggtcacctttgcagacattggcttcctggccctcacctgcttcatgctcatcctcacttcctatggctatattgtagctgccatcctgcgaattccgtcagcagatgggcgccgcaatgccttctccacttgtgctgcccacctcactgttgtcattgtttactatgtgccctgcaccttcatttacctgcggccttgttcacaggagcccctggatggggtggtagctgtcttttacactgtcatcactcccttgcttaactccatcatctacacactgtgcaacaaagaaatgaaggcagcattacagaggctagggggccacaaggaagtgcagcctcactga

SEQ ID NO: 12 - protein, 332 aa, Homo sapiens
MLEGVEHLLLLLLLTDVNSKELQSGNQTSVSHFILVGLHHPPQLGAPLFLAFLVIYLLTVSGNGLIILTVLVDIRLHRPMCLFLCHLSFLDMTISCAIVPKMLAGFLLGSRIISFGGCVIQLFSFHFLGCTECFLYTLMAYDRFLAICKPLHYATIMTHRVCNSLALGTWLGGTIHSLFQTSFVFRLPFCGPNRVDYIFCDIPAMLRLACADTAINELVTFADIGFLALTCFMLILTSYGYIVAAILRIPSADGRRNAFSTCAAHLTVVIVYYVPCTFIYLRPCSQEPLDGVVAVFYTVITPLLNSIIYTLCNKEMKAALQRLGGHKEVQPH

SEQ ID NO: 13 - DNA, 876 bp, Homo sapiens
  CDS (1)..(873)
atggagagccccaatcgaaccaccattcaggagtttatcttctccgctttcccttattcctgggttaagtctgttgtctgctttgttccactgctcttcatctatgctttcattgttgttggaaacctggtcatcatcacagtggtccagttgaatactcacctccacactcccatgtatacttttatcagtgctctttctttcctggagatttggtataccacagccacaatcccaaagatgctgtctagcctgcttagtgagaggagcatttccttcaatggttgtctcctgcagatgtatttcttccattccaccggcatctgtgaggtgtgtctcttgacagttatggcctttgaccactacctggccatatgcagccctcttcattatccctctatcatgacccccaagctatgtacccaactgactttaagttgctgtgtttgtggctttatcacaccccttcctgagattgcctggatctctacactgccattttgtggttcgaatcaccttgaacatatcttctgtgacttcctcccagtgctgcgtctggcctgcacagacacacgagccatcgtcatgattcaggtagtggatgtcattcatgcagtggagattattacagctgtgatgctcatcttcatgtcctacgatggtattgtggctgtaattctacgtattcattcagctggaggccgccggcacagcattttccacgtgtgtctctcacttcattgtcttttcgctcttctttggcagtgtgactctcatgtacctacgcttctctgccacctactctttgttctgggatatagccattgctctggcctttgcagttttgtctcccttcttcaaccccattatctatag

SEQ ID NO: 14 - protein, 291 aa, Homo sapiens
MESPNRTTIQEFIFSAFPYSWVKSVVCFVPLLFIYAFIVVGNLVIITVVQLNTHLHTPMYTFISALSFLEIWYTTATIPKMLSSLLSERSISFNGCLLQMYFFHSTGICEVCLLTVMAFDHYLAICSPLHYPSIMTPKLCTQLTLSCCVCGFITPLPEIAWISTLPFCGSNHLEHIFCDFLPVLRLACTDTRAIVMIQVVDVIHAVEIITAVMLIFMSYDGIVAVILRIHSAGGRRHSIFHVCLSLHCLFALLWQCDSHVPTLLCHLLFVLGYSHCSGLCSFVSLLQPHYL

SEQ ID NO: 15 - DNA, 939 bp, Homo sapiens
  CDS (1)..(936)
atggacacagggaactggagccaggtagcagaattcatcatcttgggcttcccccatctccagggtgtccagatttatctcttcctcttgttgcttctcatttacctcatgactgtgttgggaaacctgctgatattcctggtggtctgcctggactcccggcttcacacacccatgtaccactttgtcagcattctctccttctcagagcttggctatacagctgccaccatccctaagatgctggcaaacttgctcagtgagaaaaagaccatttcattctctgggtgtctcctgcagatctatttctttcactcccttggagcgactgagtgctatctcctgacagctatggcctacgataggtatttagccatctgccggcccctccactacccaaccctcatgaccccaacactttgtgcagagattgccattggctgttggttgggaggcttggctgggccagtagttgaaatttccttgatttcacgcctcccattctgtggccccaatcgcattcagcacgtcttttgtgacttccctcctgtgctgagtttggcttgcactgatacgtctataaatgtcctagtagattttgttataaattcctgcaagatcctagccaccttcctgctgatcctctgctcctatgtgcagatcatctgcacagtgctcagaattccctcagctgccggcaagaggaaggccatctccacgtgtgcctcccacttcactgtggttctcatcttctatgggagcatcctttccatgtatgtgcagctgaagaagagctactcactggactatgaccaggccctggcagtggtctactcagtgctcacacccttcctcaaccccttcatctacagcttgcgcaacaaggagatcaaggaggctgtgaggaggcagctaaagagaattgggatattggcatga

SEQ ID NO: 16 - protein, 312 aa, Homo sapiens
MDTGNWSQVAEFIILGFPHLQGVQIYLFLLLLLIYLMTVLGNLLIFLVVCLDSRLHTPMYHFVSILSFSELGYTAATIPKMLANLLSEKKTISFSGCLLQIYFFHSLGATECYLLTAMAYDRYLAICRPLHYPTLMTPTLCAEIAIGCWLGGLAGPVVEISLISRLPFCGPNRIQHVFCDFPPVLSLACTDTSINVLVDFVINSCKILATFLLILCSYVQIICTVLRIPSAAGKRKAISTCASHFTVVLIFYGSILSMYVQLKKSYSLDYDQALAVVYSVLTPFLNPFIYSLRNKEIKEAVRRQLKRIGILA

SEQ ID NO: 17 - DNA, 945 bp, Homo sapiens
  CDS (1)..(942)
atgatggcatctgaaagaaatcaaagcagcacacccacttttattctcttgggtttttcagaatacccagaaatccaggttccactctttctggttttcttgttcgtctacacagtcactgtagtggggaacttgggcatgataataatcatcagactcaattcaaaactccatacaatcatgtactttttccttagtcacttgtccttgacagacttctgtttttccactgtagttacacctaaactgttggagaacttggttgtggaatacagaaccatctctttctctggttgcatcatgcaattttgttttgcttgcatttttggagtgacagaaactttcatgttagcagcgatggcttatgaccgttttgtggcagtttgtaaacccttgctgtataccactattatgtctcagaagctctgtgctcttctggtggctgggtcctatacatgggggatagtgtgctccctgatactcacatattttcttcttgacttatcgttttgtgaatctaccttcataaataattttatctgtgaccactctgtaattgtttctgcctcctactcagacccctatatcagccagaggctatgctttattattgccatattcaatgaggtgagcagcctaattatcattctgacatcatatatgcttattttcactaccattatgaagatgcgatctgcaagtgggcgccagaaaactttctccacctgtgcctcccacctgacagccatcactatcttccatggaactatccttttcctttactgtgttcctaatcctaaaacttctagcctcatagttacagtggcttctgtgttttacacagtggcgattccaatgctgaacccattgatctacagccttaggaacaaagatatcaataacatgtttgaaaaattagttgtcaccaaattgatttaccactga

SEQ ID NO: 18 - protein, 314 aa, Homo sapiens [sequence omitted]

SEQ ID NO: 19 - DNA, 969 bp, Homo sapiens
  CDS (1)..(963)
atggacaagttgtcatcaggtttggatatatacaggaatccactgaagaacaagactgaagtcaccatgtttatattgacaggcttcacagatgattttgagctgcaagtcttcctatttttactattttttgcaatctatctctttaccttgataggcaatttagggctggttgtgttggtcattgaggattcctggctccacaaccccatgtattattttcttagtgttttatcattcttggatgcttgctattctacagttgtcactccaaaaatgttggtcaatttcctggcaaaaaataaatccatttcatttatcggatgtgcaacacagatgcttctttttgttacttttggaactacagaatgttttctcttggctgcaatggcttatgatcactatgtagccatctacaaccctctcctgtattcagtgagcatgtcacccagagtctatgtgccactcatcactgcttcctacgttgctggcattttacatgctactatacatatagtggctacatttagcctgtccttctgtggatccaatgaaattaggcatgtcttttgtgatatgcctcctctccttgctatttcttgttctgacactcacacaaaccagcttctactcttctactttgtgggttctattgagatagtcactatcctgattgtcctcatttcctgtgatttcattctgttgtccattctgaagatgcattctgctaagggaaggcaaaaggccttctctacatgtggctctcacctaactggagtgacaatttatcatggaacaattctcgtcagttatatgagaccaagttccagctatgcttcagaccatgacatcatagtgtcaatattttacacaattgtgattcccaagttgaatcccatcatctatagtttgaggaacaaagaagtaaaaaaggcagtgaagaaaatgttgaaattggtttacaaatga

SEQ ID NO: 20 - protein, 321 aa, Homo sapiens
MDKLSSGLDIYRNPLKNKTEVTMFILTGFTDDFELQVFLFLLFFAIYLFTLIGNLGLVVLVIEDSWLHNPMYYFLSVLSFLDACYSTVVTPKMLVNFLAKNKSISFIGCATQMLLFVTFGTTECFLLAAMAYDHYVAIYNPLLYSVSMSPRVYVPLITASYVAGILHATIHIVATFSLSFCGSNEIRHVFCDMPPLLAISCSDTHTNQLLLFYFVGSIEIVTILIVLISCDFILLSILKMHSAKGRQKAFSTCGSHLTGVTIYHGTILVSYMRPSSSYASDHDIIVSIFYTIVIPKLNPIIYSLRNKEVKKAVKKMLKLVY

SEQ ID NO: 21 - DNA, 951 bp, Homo sapiens
  CDS (1)..(948)
atggctcctgaaaatttcaccagggtcactgagtttattcttacaggtgtctctagctgtccagagctccagattcccctcttcctggtctttctggtgctctatgggctgaccatggcagggaacctgggcatcatcaccctcaccagtgttgactctcgacttcaaacccccatgtactttttcctgcaacatctggctctcattaatcttggtaactctactgtcattgcccctaaaatgctgattaactttttagtaaagaagaaaactacctcattctatgaatgtgccacccaactgggagggttcttgttctttattgtatcggaggtaatcatgctggctttgatggcctgtgaccgctatgtggctatttgtaaccctctgctgtacatggtggtggtgtctcggcggctctgcctcctgctggtctccctcacatacctctatggcttttctacagctattgtggtttcatcttatgtattctctgtgtcttattgctcttctaatataatcaatcatttttactgtgataatgttcctctgttagcattatcttgctctgatacttacttaccagaaacagttgtctttatatctgcagcaacaaatgtggttggttccttgattatagttctagtatcttatttcaatattgttttgtctattttaaaaatatgttcatcagaaggaaggaaaaaagccttttctacctgtgcttcacatatgatggcagtcacaattttttatgggacattgctattcatgtatgtgcagccccgaagtaaccattcattggatactgatgataagatggcttctgtgttttacacgttggtaattcctatgctgaatcccttgatctacagcctgaggaataaggatgtgaagactgctctacagagattcatgacaaatctgtgctattcctttaaaacaatgtaa

SEQ ID NO: 22 - protein, 316 aa, Homo sapiens
MAPENFTRVTEFILTGVSSCPELQIPLFLVFLVLYGLTMAGNLGIITLTSVDSRLQTPMYFFLQHLALINLGNSTVIAPKMLINFLVKKKTTSFYECATQLGGFLFFIVSEVIMLALMACDRYVAICNPLLYMVVVSRRLCLLLVSLTYLYGFSTAIVVSSYVFSVSYCSSNIINHFYCDNVPLLALSCSDTYLPETVVFISAATNVVGSLIIVLVSYFNIVLSILKICSSEGRKKAFSTCASHMMAVTIFYGTLLFMYVQPRSNHSLDTDDKMASVFYTLVIPMLNPLIYSLRNKDVKTALQRFMTNLCYSFKTM

SEQ ID NO: 23 - DNA, 987 bp, Homo sapiens
  CDS (1)..(984)
atgaagctgtggatggagagtcacctgatagtcccagaaacccgtcccagcccaaggatgatgagtaaccagacgttggtaaccgagttcatcctgcagggcttttcggagcacccagaataccgggtgttcttattcagctgtttcctcttcctctactctggggccctcacaggtaatgtcctcatcaccttggccatcacgttcaaccctgggctccacgctcctatgtactttttcttactcaacttggctactatggacattatctgcacctcttccatcatgcccaaggcgctggccagtctggtgtcggaagagagctccatctcctacgggggctgcatggcccagctctatttcctcacgtgggctgcatcctcagagctgctgctcctcacggtcatggcctatgaccggtacgcagccatctgccacccgctgcattacagcagcatgatgagcaaggtgttctgcagcgggctggccacagccgtgtggctgctctgcgccgtcaacacggccatccacacggggctgatgctgcgcttggatttctgtggccccaatgtcattatccatttcttctgcgaggtccctcccctgctgcttctctcctgcagctccacctacgtcaacggtgtcatgattgtcctggcggatgctttctacggcatagtgaacttcctgatgaccatcgcgtcctatggcttcatcgtctccagcatcctgaaggtgaagactgcctgggggaggcagaaagccttctccacctgctcttcccacctcaccgtggtgtgcatgtattacaccgctgtcttctacgcctacataagcccggtctctggctacagcgcagggaagagcaagttggctggcctgctgtacactgtgctgagtcctaccctcaaccccctcatctatactttgagaaacaaggaggtcaaagcagccctcaggaagcttttccctttcttcagaaattaa

SEQ ID NO: 24 - protein, 328 aa, Homo sapiens
MKLWMESHLIVPETRPSPRMMSNQTLVTEFILQGFSEHPEYRVFLFSCFLFLYSGALTGNVLITLAITFNPGLHAPMYFFLLNLATMDIICTSSIMPKALASLVSEESSISYGGCMAQLYFLTWAASSELLLLTVMAYDRYAAICHPLHYSSMMSKVFCSGLATAVWLLCAVNTAIHTGLMLRLDFCGPNVIIHFFCEVPPLLLLSCSSTYVNGVMIVLADAFYGIVNFLMTIASYGFIVSSILKVKTAWGRQKAFSTCSSHLTVVCMYYTAVFYAYISPVSGYSAGKSKLAGLLYTVLSPTLNPLIYTLRNKEVKAALRKLFPFFRN

SEQ ID NO: 25 - DNA, 960 bp, Homo sapiens
  CDS (1)..(957)
atgacacctggagaactagcccttgccagtggcaaccacaccccagtcaccaagttcatcttgcagggattctccaattatccagacctccaggagcttctcttcggagccatcctgctcatctatgccataacagtggtgggcaacttgggaatgatggcactcatcttcacagactcccatctccaaagcccaatgtatttcttcctcaatgtcctctcgtttcttgatatttgttactcttctgtggtcacacctaagctcttggtcaacttcctggtctctgacaagtccatctcttttgagggctgtgtggtccagctcgccttctttgtagtgcatgtgacagctgagagcttcctgctggcctccatggcctatgaccgcttcctagccatctgtcaacccctccattatggttctatcatgaccagggggacctgtctccagctggtagctgtgtcctatgcatttggtggagccaactccgctatccagactggaaatgtctttgccctgcctttctgtgggcccaaccagctaacacactactactgtgacataccaccccttctccacctggcttgtgccaacacagccacagcaagagtggtcctctatgtcttttctgctctggtcacccttctgcctgctgcagtcattctcacctcctactgcttggtcttggtggccattgggaggatgcgctcagtagcagggagggagaaggacctctccacttgtgcctcccactttctggccattgccattttctatggcaccgtggttttcacctatgttcagccccatggatctactaacaataccaatggccaagtagtgtccgtcttctacaccatcataattcccatgctcaatcccttcatctatagcctccgcaacaaggaggtgaagggcgctctgcagaggaagcttcaggtcaacatctttcccggctga

SEQ ID NO: 26 - protein, 319 aa, Homo sapiens
MTPGELALASGNHTPVTKFILQGFSNYPDLQELLFGAILLIYAITVVGNLGMMALIFTDSHLQSPMYFFLNVLSFLDICYSSVVTPKLLVNFLVSDKSISFEGCVVQLAFFVVHVTAESFLLASMAYDRFLAICQPLHYGSIMTRGTCLQLVAVSYAFGGANSAIQTGNVFALPFCGPNQLTHYYCDIPPLLHLACANTATARVVLYVFSALVTLLPAAVILTSYCLVLVAIGRMRSVAGREKDLSTCASHFLAIAIFYGTVVFTYVQPHGSTNNTNGQVVSVFYTIIIPMLNPFIYSLRNKEVKGALQRKLQVNIFPG

SEQ ID NO: 27 - DNA, 939 bp, Homo sapiens
  CDS (1)..(936)
atgagaaatggcacagtaatcacagaattcatcctgctaggctttcctgttatccaaggcctacaaacacctctctttattgcaatctttctcacctacatattaacccttgcaggcaatgggcttattattgccactgtgtgggctgagcccaggctacaaattccaatgtacttcttcctttgtaacttgtctttcttagaaatctggtacaccaccacagtcatccccaaactgctaggaacctttgtagtggcaagaacagtaatctgcatgtcctgctgcctgctgcaggccttcttccacttcttcgtgggcaccaccgagttcttgatcctcactatcatgtcttttgaccgctacctcaccatctgcaatccccttcaccaccccaccatcatgaccagcaaactctgcctgcagctggccctgagctcctgggtggtgggcttcaccattgtcttttgtcagacgatgctgctcatccagttgccattctgtggcaataatgttatcagtcatttctactgtgatgttgggcccagtttgaaagccgcctgcatagacaccagcattttggaactcctgggcgtcatagcaaccatccttgtgatcccagggtcacttctctttaatatgatttcttatatctacattctgtccgcaatcctacgaattccttcagccactggccaccaaaagactttctctacctgtgcctcgcacctgacagttgtctccctgctctacggggctgttctgttcatgtacctaagacccacagcacactcctcctttaagattaataaggtggtgtctgtgctaaatactatcctcaccccccttctgaatccctttatttatactattagaaacaaggaggtgaagggagccttaagaaaggcaatgacttgcccaaagactggtcatgcaaagtaa

SEQ ID NO: 28 - protein, 312 aa, Homo sapiens
MRNGTVITEFILLGFPVIQGLQTPLFIAIFLTYILTLAGNGLIIATVWAEPRLQIPMYFFLCNLSFLEIWYTTTVIPKLLGTFVVARTVICMSCCLLQAFFHFFVGTTEFLILTIMSFDRYLTICNPLHHPTIMTSKLCLQLALSSWVVGFTIVFCQTMLLIQLPFCGNNVISHFYCDVGPSLKAACIDTSILELLGVIATILVIPGSLLFNMISYIYILSAILRIPSATGHQKTFSTCASHLTVVSLLYGAVLFMYLRPTAHSSFKINKVVSVLNTILTPLLNPFIYTIRNKEVKGALRKAMTCPKTGHAK

SEQ ID NO: 29 - DNA, 1038 bp, Homo sapiens
  CDS (1)..(1035)
atgaatatcacactttattcatttctttatgtcctcagattaaatgaagggaatagtactggaagaaatatagatgaaagaaagaaaatgcaaggagaaaacttcaccatttggagcatttttttcttggagggattttcccagtacccagggttagaagtggttctcttcgtcttcagccttgtaatgtatctgacaacgctcttgggcaacagcactcttattttgatcactatcctagattcacgccttaaaacccccatgtacttattccttggaaatctctctttcatggatatttgttacacatctgcctctgttcctactttgctggtgaacttgctgtcatcccagaaaaccattatcttttctgggtgtgctgtacagatgtatctgtcccttgccatgggctccacagagtgtgtgctcctggccgtgatggcatatgaccgttatgtggccatttgtaacccgctgagatactccatcatcatgaacaggtgcgtctgtgcacggatggccacggtctcctgggtgacgggttgcctgaccgctctgctggaaaccagttttgccctgcagatacccctctgtgggaatctcatcgatcacttcacgtgtgaaattctggcggtgctaaagttagcttgcacaagttcactgctcatgaacaccatcatgctggtggtcagcattctcctcttgccaattccaatgctcttagtttgcatctcttacatcttcatcctttccactattctgagaatcacctcagcagagggaagaaacaaggctttttctacctgtggtgcccatttgactgtggtgattttgtattatggggctgccctctctatgtacctaaagccttcttcatcaaatgcacaaaaaatagacaaaatcatctcgttgctttacggagtgcttacccctatgttgaaccccataatttacagtttaagaaacaaggaagtcaaagatgctatgaagaaattgctgggcaaaataacattgcatcaaacacacgaacatctctga

SEQ ID NO: 30 - protein, 345 aa, Homo sapiens
MNITLYSFLYVLRLNEGNSTGRNIDERKKMQGENFTIWSIFFLEGFSQYPGLEVVLFVFSLVMYLTTLLGNSTLILITILDSRLKTPMYLFLGNLSFMDICYTSASVPTLLVNLLSSQKTIIFSGCAVQMYLSLAMGSTECVLLAVMAYDRYVAICNPLRYSIIMNRCVCARMATVSWVTGCLTALLETSFALQIPLCGNLIDHFTCEILAVLKLACTSSLLMNTIMLVVSILLLPIPMLLVCISYIFILSTILRITSAEGRNKAFSTCGAHLTVVILYYGAALSMYLKPSSSNAQKIDKIISLLYGVLTPMLNPIIYSLRNKEVKDAMKKLLGKITLHQTHEHL

SEQ ID NO: 31 - DNA, 954 bp, Homo sapiens
  CDS (1)..(951)
atgctaaggaatggcagcatagtgacggaatttatcctcgtgggctttcagcagagctccacttccacacgagcattgctctttgccctcttcttggccctctacagcctcaccatggccatgaatggcctcatcatctttatcacctcctggacagaccccaagctcaacagccccatgtacttcttcctcggccatctgtctctcctggatgtctgcttcatcaccactaccatcccacagatgttgatccacctcgtggtcagggaccacattgtctcctttgtatgttgcatgacccagatgtactttgtcttctgtgttggtgtggccgagtgcatcctcttggctttcatggcctatgaccgttatgttgctatctgctacccacttaactatgtcccgatcataagccagaaggtctgtgtcaggcttgtgggaactgcctggttctttgggctgatcaatggcatctttctcgagtatatttcattccgagagcccttccgcagagacaaccacatagaaagcttcttctgtgaggcccccatagtgattggcctctcttgtggggaccctcagtttagtctgtgggcaatctttgccgatgccatcgtggtaattctcagccccatggtgctcactgtcacttcctatgtgcacatcctggccaccatcctcagcaaagcctcctcctcaggtcgggggaagactttctctacttgtgcctctcacctgactgtggtcatctttctctacacttcagctatgttctcttacatgaacccccacagcacacatgggcctgacaaagacaaacctttctccctcctgtacaccatcattacccccatgtgcaaccccatcatttatagtttccgcaacaaggaaattaaggaggccatggtgagggcacttggaagaaccaggctggcccagccacagtctgtctag

SEQ ID NO: 32 - protein, 317 aa, Homo sapiens
MLRNGSIVTEFILVGFQQSSTSTRALLFALFLALYSLTMAMNGLIIFITSWTDPKLNSPMYFFLGHLSLLDVCFITTTIPQMLIHLVVRDHIVSFVCCMTQMYFVFCVGVAECILLAFMAYDRYVAICYPLNYVPIISQKVCVRLVGTAWFFGLINGIFLEYISFREPFRRDNHIESFFCEAPIVIGLSCGDPQFSLWAIFADAIVVILSPMVLTVTSYVHILATILSKASSSGRGKTFSTCASHLTVVIFLYTSAMFSYMNPHSTHGPDKDKPFSLLYTIITPMCNPIIYSFRNKEIKEAMVRALGRTRLAQPQSV

SEQ ID NO: 33 - DNA, 960 bp, Homo sapiens
  CDS (1)..(957)
atgttctatctacactggaccatggaaaaaagcaataatagcactttgtttattctcttggggttttcccaaaataagaacattgaagtcctctgctttgtattatttttgttttgctacattgctatttggatgggaaacttactcataatgatttctatcacgtgcacccagctcattcaccaacccatgtatttcttcctcaattacctctcactctccgacctttgctacacatccacagtgacccccaaattaatggttgacttactggcagaaagaaagaccatttcctataataactgtatgatacaactctttaccacccatttttttggaggcatagagatcttcattctcacagggatggcctatgaccgctatgtggccatttgcaagcccctgcactacaccattattatgagcaggcaaaagtgtaacacaatcatcatagtttgttgtactgggggatttatacattctgccagtcagtttcttctcaccatctttgtaccattttgtggcccaaatgagatagatcactacttctgtgatgtgtatcctttgctgaaattggcctgttctaatatacacatgataggtctcttagtcattgctaattcaggcttaattgctttggtgacatttgttgtcttgttgttgtcttatgtttttatattgtataccatcagagcatactctgcagagagacgcagcaaagctcttgccacttgtagttctcatgtaattgttgtggtcctgttttttgctcctgcattgttcatttacattagaccggtcacaacattctcagaagataaagtgtttgcccttttttataccatcattgctcccatgttcaaccctctcatatacacgctgagaaacacagagatgaagaacgccatgaggaaagtgtggtgttgtcaaatactcctgaaaagaaatcaacttttctga

SEQ ID NO: 34 - protein, 319 aa, Homo sapiens
MFYLHWTMEKSNNSTLFILLGFSQNKNIEVLCFVLFLFCYIAIWMGNLLIMISITCTQLIHQPMYFFLNYLSLSDLCYTSTVTPKLMVDLLAERKTISYNNCMIQLFTTHFFGGIEIFILTGMAYDRYVAICKPLHYTIIMSRQKCNTIIIVCCTGGFIHSASQFLLTIFVPFCGPNEIDHYFCDVYPLLKLACSNIHMIGLLVIANSGLIALVTFVVLLLSYVFILYTIRAYSAERRSKALATCSSHVIVVVLFFAPALFIYIRPVTTFSEDKVFALFYTIIAPMFNPLIYTLRNTEMKNAMRKVWCCQILLKRNQLF

SEQ ID NO: 35 - DNA, 990 bp, Homo sapiens
  CDS (1)..(987)
atgatccctgttggagctttcatcttttccttgggaaacatgcaaaaccaaagctttgtaactgagtttgtcctcctgggactttcacagaatccaaatgttcaggaaatagtatttgttgtatttttgtttgtctacattgcaactgttgggggcaacatgctaattgtagtaaccattctcagcagccctgctcttctggtgtctcctatgtacttcttcttgggcttcctgtccttcctggatgcgtgcttctcatctgtcatcaccccaaagatgattgtagactccctctatgtgacaaaaaccatctcttttgaaggctgcatgatgcagctctttgctgaacacttctttgctggggtggaggtgattgtcctcacagccatggcctatgatcgttatgtggccatttgcaagcccttgcattactcttctatcatgaacaggaggctctgtggcattctgatgggggtagcctggacagggggcctcttgcattccatgatacaaattctttttactttccagcttcccttttgtggccccaatgtcatcaatcactttatgtgtgacttgtacccgttactggagcttgcctgcactgatactcacatctttggcctcatggtggtcatcaacagtgggtttatctgcatcataaacttctccttgttgcttgtctcctatgctgtcatcttgctctctctgagaacacacagttctgaagggcgctggaaagctctctccacctgtggatctcacattgctgttgtgattttgttctttgtcccatgcatatttgtatatacacgacctccatctgctttttcccttgacaaaatggcggcaatattttatatcatcttaaatcccttgctcaatcctttgatttacactttcaggaataaggaagtaaaacaggccatgaggagaatatggaacagactgatggtggtttctgatgagaaagaaaatattaaactttaa

SEQ ID NO: 36 - protein, 329 aa, Homo sapiens
MIPVGAFIFSLGNMQNQSFVTEFVLLGLSQNPNVQEIVFVVFLFVYIATVGGNMLIVVTILSSPALLVSPMYFFLGFLSFLDACFSSVITPKMIVDSLYVTKTISFEGCMMQLFAEHFFAGVEVIVLTAMAYDRYVAICKPLHYSSIMNRRLCGILMGVAWTGGLLHSMIQILFTFQLPFCGPNVINHFMCDLYPLLELACTDTHIFGLMVVINSGFICIINFSLLLVSYAVILLSLRTHSSEGRWKALSTCGSHIAVVILFFVPCIFVYTRPPSAFSLDKMAAIFYIILNPLLNPLIYTFRNKEVKQAMRRIWNRLMVVSDEKENIKL

SEQ ID NO: 37 - DNA, 963 bp, Homo sapiens
  CDS (1)..(960)
atgagttcctgcaacttcacacatgccacctgtgtgcttattggtatcccaggattagagaaagcccatttctgggttggcttccccctcctttccatgtatgtagtggcaatgtgtggaaactgcatcgtggtcttcatcgtaaggacggaacgcagcctgcacgctccgatgtacctctttctctgcatgcttgcagccattgacctggccttatccacatccaccatgcctaagatccttgcccttttctggtttgattcccgagagattagcattgaggcctgtcttacccagatgttctttattcatgccctctcagccattgaatccaccatcctgctggccatggcctttgaccgttatgtggccatctgccacccactgcgccatgctgcagtgctcaacaatacagtaacagcccagattggcatcgtggctgtggtccgcggatccctcttttttttcccactgcctctgctgatcaagcggctggccttctgccactccaatgtcctctcgcactcctattgtgtccaccaggatgtaatgaagttggcctatgcagacactttgcccaatgtggtatatggtcttactgccattctgctggtcatgggcgtggacgtaatgttcatctccttgtcctattttctgataatacgaacggttctgcaactgccttccaagtcagagcgggccaaggcctttggaacctgtgtgtcacacattggtgtggtactcgccttctatgtgccacttattggcctctcagttgtacaccgctttggaaacagccttcatcccattgtgcgtgttgtcatgggtgacatctacctgctgctgcctcctgtcatcaatcccatcatctatggtgccaaaaccaaacagatcagaacacgggtgctggctatgttcaagatcagctgtgacaaggacttgcaggctgtgggaggcaagtga

SEQ ID NO: 38 - protein, 320 aa, Homo sapiens
MSSCNFTHATCVLIGIPGLEKAHFWVGFPLLSMYVVAMCGNCIVVFIVRTERSLHAPMYLFLCMLAAIDLALSTSTMPKILALFWFDSREISIEACLTQMFFIHALSAIESTILLAMAFDRYVAICHPLRHAAVLNNTVTAQIGIVAVVRGSLFFFPLPLLIKRLAFCHSNVLSHSYCVHQDVMKLAYADTLPNVVYGLTAILLVMGVDVMFISLSYFLIIRTVLQLPSKSERAKAFGTCVSHIGVVLAFYVPLIGLSVVHRFGNSLHPIVRVVMGDIYLLLPPVINPIIYGAKTKQIRTRVLAMFKISCDKDLQAVGGK

SEQ ID NO: 39 - DNA, 924 bp, Homo sapiens
  CDS (1)..(921)
atgctcaatttcaccgatgtgacagagttcattcttttggggctaacgagccgtcgagaatggcaagttctcttcttcatcatctttcttgtggtctacatcatcaccatggtgggcaatatcggcatgatggtgttaatcaaggtcagtcctcagcttaacaaccccatgtactttttcctcagtcacttgtcatttgttgatgtgtggttttcttccaatgtcacccctaaaatgttggaaaacctgttttcagataaaaaaacaattacttatgctggttgtttagtacagtgtttcttcttcattgctcttgtccatgtggaaatttttattcttgctgcgatggcctttgatagatacatggcaattgggaatcctctgctttatggcagtaaaatgtcaagggttgtctgtattcgactgattactttcccttacatttatggttttctgacgagtctggcagcaacattatggacttacggcttgtacttctgtggaaaaattgagatcaaccatttctactgtgcagatccacctctcatcaaaatggcctgtgccgggacctttgtaaaagaatatacaatgatcatacttgccggcattaacttcacatattccctgactgtaattatcatctcttacttattcatcctcattgccattctgcgaatgcgctcagcagaaggaaggcagaaggccttttccacatgtgggtcccatctgacagctgtcattatattctatggtactctgatcttcatgtatctcagacgtcccacagaggagtctgtggagcaggggaagatggtggctgtgttctataccacagtgatccccatgttgaatcccatgatctacagtctgaggaacaaggatgtgaaaaaggccatgatgaaagtgatcagcagatcatgttaa

SEQ ID NO: 40 - protein, 307 aa, Homo sapiens
MLNFTDVTEFILLGLTSRREWQVLFFIIFLVVYIITMVGNIGMMVLIKVSPQLNNPMYFFLSHLSFVDVWFSSNVTPKMLENLFSDKKTITYAGCLVQCFFFIALVHVEIFILAAMAFDRYMAIGNPLLYGSKMSRVVCIRLITFPYIYGFLTSLAATLWTYGLYFCGKIEINHFYCADPPLIKMACAGTFVKEYTMIILAGINFTYSLTVIIISYLFILIAILRMRSAEGRQKAFSTCGSHLTAVIIFYGTLIFMYLRRPTEESVEQGKMVAVFYTTVIPMLNPMIYSLRNKDVKKAMMKVISRSC

SEQ ID NO: 41 - DNA, 918 bp, Homo sapiens
  CDS (1)..(915)
atgtccaacacaaatggcagtgcaatcacagaattcattttacttgggctcacagattgcccggaactccagtctctgctttttgtgctgtttctggttgtttacctcgtcaccctgctaggcaacctgggcatgataatgttaatgagactggactctcgccttcacacgcccatgtacttcttcctcactaacttagcctttgtggatttgtgctatacatcaaatgcaaccccgcagatgtcgactaatatcgtatctgagaagaccatttcctttgctggttgctttacacagtgctacattttcattgcccttctactcactgagttttacatgctggcagcaatggcctatgaccgctatgtggccatatatgaccctctgcgctacagtgtgaaaacgtccaggagagtttgcatctgcttggccacatttccctatgtctatggcttctcagatggactcttccaggccatcctgaccttccgcctgaccttctgtagatccaatgtcatcaaccacttctactgtgctgacccgccgctcattaagctttcttgttctgatacttatgtcaaagagcatgccatgttcatatctgctggcttcaacctctccagctccctcaccatcgtcttggtgtcctatgccttcattcttgctgccatcctccggatcaaatcagcagagggaaggcacaaggcattctccacctgtggttcccatatgatggctgtcaccctgttttatgggactctcttttgcatgtatataagaccaccaacagataagactgttgaggaatctaaaataatagctgtcttttacacctttgtgagtccggtacttaatccattgatctacagtctgaggaataaagatgtgaagcaggccttgaagaatgtcctgagatga

SEQ ID NO: 42 - protein, 305 aa, Homo sapiens [sequence omitted]

SEQ ID NO: 43 - DNA, 951 bp, Homo sapiens
  CDS (1)..(948)
atgggaaaaccaggcagagtgaaccaaaccactgtttcagacttcctccttctaggactctctgagtggccagaggagcagcctcttctgtttggcatcttccttggcatgtacctggtcaccatggtggggaacctgctcattatcctggccatcagctctgacccacacctccatactcccatgtacttctttctggccaacctgtcattaactgatgcctgtttcacttctgcctccatccccaaaatgctggccaacattcatacccagagtcagatcatctcgtattctgggtgtcttgcacagctatatttcctccttatgtttggtggccttgacaactgcctgctggctgtgatggcatatgaccgctatgtggccatctgccaaccactccattacagcacatctatgagtccccagctctgtgcactaatgctgggtgtgtgctgggtgctaaccaactgtcctgccctgatgcacacactgttgctgacccgcgtggctttctgtgcccagaaagccatccctcatttctattgtgatcctagtgctctcctgaagcttgcctgctcagatacccatgtaaacgagctgatgatcatcaccatgggcttgctgttcctcactgttcccctcctgctgatcgtcttctcctatgtccgcattttctgggctgtgtttgtcatctcatctcctggagggagatggaaggccttctctacctgtggttctcatctcacggtggttctgctcttctatgggtctcttatgggtgtgtatttacttcctccatcaacttactctacagagagggaaagtagggctgctgttctctatatggtgattattcccacgctaaacccattcatttatagcttgaggaacagagacatgaaggaggctttgggtaaactttttgtcagtggaaaaacattctttttatga

SEQ ID NO: 44 - protein, 316 aa, Homo sapiens
MGKPGRVNQTTVSDFLLLGLSEWPEEQPLLFGIFLGMYLVTMVGNLLIILAISSDPHLHTPMYFFLANLSLTDACFTSASIPKMLANIHTQSQIISYSGCLAQLYFLLMFGGLDNCLLAVMAYDRYVAICQPLHYSTSMSPQLCALMLGVCWVLTNCPALMHTLLLTRVAFCAQKAIPHFYCDPSALLKLACSDTHVNELMIITMGLLFLTVPLLLIVFSYVRIFWAVFVISSPGGRWKAFSTCGSHLTVVLLFYGSLMGVYLLPPSTYSTERESRAAVLYMVIIPTLNPFIYSLRNRDMKEALGKLFVSGKTFFL

SEQ ID NO: 45 - DNA, 975 bp, Homo sapiens
  CDS (1)..(972)
atgggaatgtccaacctgacaagactctctgaatttattctcttgggactctcctctcggtctgaagaccagaggccactctttgccctctttcttatcatatacctggtcactttgatgggaaatctgctcatcatcttggctatccactctgatcctcgacttcaaaaccctatgtattttttcctaagcatcttgtcctttgctgatatttgctacacaacagtcatagtcccaaagatgctcgtgaacttcttatcagagaaaaagaccatttcctatgctgaatgtctggcacagatgtatttcttcctggtttttggaaacatagatagttatctcctggcggctatggccatcaaccgctgtgtagccatttgtaacccattccattatgtcactgttatgaaccgcagatgctgtgtgttgctactagcattccccatcactttctcctatttccactctctcctacatgtcctcctggtgaatcggctcaccttttgtacatcaaatgttatccatcattttttttgtgatgtcaaccctgtgctgaaactgtcctgctcctccacctttgtcaatgaaattgtggccatgacagaagggctggcctctgtgatggctccatttgtctgtatcatcatctcttatctaagaattctcatcgctgttctcaagattccctcagcagctggaaaacacaaagccttctccacctgcagctcccatctcactgtggtgattctgttttatgggagtattagctatgtctatttgcagcctttgtccagctatactgtcaaggaccgaatagcaacaatcaactacactgtgttgacatcagtgttgaacccatttatctacagtttaagaaacaaagacatgaaacggggcttacagaaattgataaacaagattaagtctcaaatgagtaggttctctacaaagaccaataaaatctgtggaccctga

SEQ ID NO: 46 - protein, 324 aa, Homo sapiens
MGMSNLTRLSEFILLGLSSRSEDQRPLFALFLIIYLVTLMGNLLIILAIHSDPRLQNPMYFFLSILSFADICYTTVIVPKMLVNFLSEKKTISYAECLAQMYFFLVFGNIDSYLLAAMAINRCVAICNPFHYVTVMNRRCCVLLLAFPITFSYFHSLLHVLLVNRLTFCTSNVIHHFFCDVNPVLKLSCSSTFVNEIVAMTEGLASVMAPFVCIIISYLRILIAVLKIPSAAGKHKAFSTCSSHLTVVILFYGSISYVYLQPLSSYTVKDRIATINYTVLTSVLNPFIYSLRNKDMKRGLQKLINKIKSQMSRFSTKTNKICGP

SEQ ID NO: 47 - DNA, 951 bp, Homo sapiens
  CDS (1)..(948)
atgccttaaatgacaatggctgctgagaattcctccttcgtgacacagtttatcctcgcaggcttaactgaccaaccgggagtccagatccccctcttcttcctgtttctaggcttctacgtggtcactgtggtggggaacctgggcttgataaccctgataaggctcaactctcacttgcacacccctatgtacttcttcctctataacttgtccttcatagatttctgctattccagtgttatcactcccaaaatgctgatgagctttgtcttaaagaagaacagcatctcctacgcagggtgtatgactcagctcttcttctttcttttctttgttgtctctgagtccttcatcctgtcagcaatggcgtatgaccgctatgtggccatctgtaacccactgttgtacatggtcaccatgtctccccaggtgtgttttctccttttgttgggtgtctatgggatggggtttgctggggccatggcccacacagcgtgcatgatgggtgtgaccttctgtgccaataaccttgtcaaccactacatgtgtgacatccttccccttcttgagtgtgcttgcaccagcacctatgtgaatgagcttgtagtgtttgttgttgtgggcattgatattggtgtgcccacagtcaccatcttcatttcctatgctctcattctctccagcatcttccacattgattccacggagggcaggtccaaagccttcagcacctgcagctcccacataattgcagtttctctgttctttgggtcaggagcattcatgtacctcaaacccttttctcttttagctatgaaccagggcaaggtgtcttccctattctataccactgtggtgcccatgctcaacccattaatttatagcctgaggaataaggacgtcaaagttgctctaaagaaaatcttgaacaaaaatgcattctcctga

SEQ ID NO: 48 - protein, 313 aa, Homo sapiens
MTMAAENSSFVTQFILAGLTDQPGVQIPLFFLFLGFYVVTVVGNLGLITLIRLNSHLHTPMYFFLYNLSFIDFCYSSVITPKMLMSFVLKKNSISYAGCMTQLFFFLFFVVSESFILSAMAYDRYVAICNPLLYMVTMSPQVCFLLLLGVYGMGFAGAMAHTACMMGVTFCANNLVNHYMCDILPLLECACTSTYVNELVVFVVVGIDIGVPTVTIFISYALILSSIFHIDSTEGRSKAFSTCSSHIIAVSLFFGSGAFMYLKPFSLLAMNQGKVSSLFYTTVVPMLNPLIYSLRNKDVKVALKKILNKNAFS

SEQ ID NO: 49 - DNA, 945 bp, Homo sapiens
  CDS (1)..(942)
atggaaaaaagaaatctaacagttgtcagggaattcgtccttctgggacttcctagctcagcagagcagcagcacctcctgtctgtgctctttctctgtatgtatttagccaccaccttggggaacatgctcatcattgcgacgattggctttgactctcacctccattcccctatgtacttcttccttagtaacttggcctttgttgacatctgctttacgtcgactacagtcccccaaatggtagtgaatatcttgactggcaccaagactatctcttttgcaggctgcctcacccagctcttcttcttcgtttcttttgtgaatatggacagcctccttctgtgtgtgatggcgtatgatagatatgtggcgatttgccaccccttacattacaccgccagaatgaacctgtgcctttgtgtccagctagtggctggactgtggcttgttacttacctccacgccctcctgcatactgtcctaatagcacagctgtccttctgtgcctccaatatcatccatcatttcttctgtgatctcaatcctctcctgcagctctcttgctctgacgtctccttcaatgtaatgatcatttttgcagtaggaggtctattggctctcacgccccttgtctgtatcctcgtatcttatggacttatcttctccactgttctgaagatcacctctactcagggcaagcagagagctgtttccacctgcagctgccacctgtcagtggtggtgttgttttacggcacagccatcgccgtctatttcagcccttcatccccccatatgcctgagagcgacactctgtcaaccatcatgtattcaatggtggctccgatgctgaatcctttcatctataccctaaggaacagggatatgaagaggggacttcagaaaatgcttctcaagtgcacagtctttcagcagcaataa

SEQ ID NO: 50 - protein, 314 aa, Homo sapiens
MEKRNLTVVREFVLLGLPSSAEQQHLLSVLFLCMYLATTLGNMLIIATIGFDSHLHSPMYFFLSNLAFVDICFTSTTVPQMVVNILTGTKTISFAGCLTQLFFFVSFVNMDSLLLCVMAYDRYVAICHPLHYTARMNLCLCVQLVAGLWLVTYLHALLHTVLIAQLSFCASNIIHHFFCDLNPLLQLSCSDVSFNVMIIFAVGGLLALTPLVCILVSYGLIFSTVLKITSTQGKQRAVSTCSCHLSVVVLFYGTAIAVYFSPSSPHMPESDTLSTIMYSMVAPMLNPFIYTLRNRDMKRGLQKMLLKCTVFQQQ

SEQ ID NO: 51 - DNA, 966 bp, Homo sapiens
  CDS (1)..(963)
atgcccatacttatggctataggaaactggacagaaataagtgaatttatcctcatgagcttctcttccctacctactgaaatacagtcattgctcttcctgacatttctaactatctatttggttactctgaagggaaacagcctcatcattctggttaccctagctgaccccatgctacacagccccatgtacttcttcctcagaaacttatctttcctggagattggcttcaacctagtcattgtgcccaaaatgctggggaccctgcttgcccaggacacaaccatctccttccttggctgtgccactcagatgtatttcttcttcttctttggggtagctgaatgcttcctcctggctaccatggcatatgaccgctatgtggccatctgcagtcccttgcactacccagtcatcatgaaccaaaggacacgggccaaactggctgctgcttcctggttcccaggctttcctgtagctactgtgcagaccacatggctcttcagttttccattctgtggcaccaacaaggtgaaccacttcttctgtgacagcccgcctgtgctgaagctggtctgtgcagacacagcactgtttgagatctacgccatcgtcggaaccattctggtggtcatgatcccctgcttgctgatcttgtgttcctatactcgcattgctgctgctatcctcaagatcccatcagctaaagggaagcataaagccttctctacgtgctcctcacacctccttgttgtctctcttttctatatatcttctagcctcacctacttctggcctaaatcaaataattctcctgagagcaagaagttgttatcattatcctacactgttgtgactcccatgttgaaccccattatctacagcttgagaaatagcgaggtgaagaatgccctcagcaggaccttccacaaggtcctagccctcagaaactgtatcccatag

SEQ ID NO: 52 - protein, 321 aa, Homo sapiens
MPILMAIGNWTEISEFILMSFSSLPTEIQSLLFLTFLTIYLVTLKGNSLIILVTLADPMLHSPMYFFLRNLSFLEIGFNLVIVPKMLGTLLAQDTTISFLGCATQMYFFFFFGVAECFLLATMAYDRYVAICSPLHYPVIMNQRTRAKLAAASWFPGFPVATVQTTWLFSFPFCGTNKVNHFFCDSPPVLKLVCADTALFEIYAIVGTILVVMIPCLLILCSYTRIAAAILKIPSAKGKHKAFSTCSSHLLVVSLFYISSSLTYFWPKSNNSPESKKLLSLSYTVVTPMLNPIIYSLRNSEVKNALSRTFHKVLALRNCIP

SEQ ID NO: 53 - DNA, 933 bp, Homo sapiens
  CDS (1)..(930)
caaactatgagacagataaatcagacacaagtgacagaattcctccttctgggactctctgatgggccacacaccgagcagctgctatttatcgtattattgggtgtctacctggtcactgtgcttggaaatctgcttctaatctcccttgttcatgttgactcccaacttcacacacccatgtatttttttctctgcaacttgtctctggctgacctctgtttctctaccaacatagttcctcaggcactagtccacctgctttccagaaagaaggtcattgcattcacactttgcgcagctcgacttctctttttcctcatttttgggtgtacccagtgcgcccttcttgcagtgatgtcctatgatcgctatgttgcaatctgcaatcctctgcgttaccctaacatcatgacctggaaagtgtgtgtccagctggcaacaggatcatggaccagtggcattctggtgtctgtggtagacaccaccttcatactgaggctaccctaccgaggcagtaacagcattgctcatttcttttgtgaggcccctgcactattgatcttagcatccacagacacccatgcatcagagatggccatttttcttatgggggttgtgattctcctcatacctgtttttctgattctggtatcctatggccgtatcatagtaactgtggtcaagatgaagtcaactgtggggagtctcaaggcattttctacctgtggctcccacctcatggtggtcatacttttttatggatcagcaattatcacttacatgacacccaagtcttccaaacagcaggaaaaatcggtgtctgttttctatgcaatagtgactcccatgcttaatcccctcatctatagcctgagaaacaaggatgtgaaggcagctctgaggaaagtagccacaaggaatttcccatga

SEQ ID NO: 54 - protein, 310 aa, Homo sapiens
QTMRQINQTQVTEFLLLGLSDGPHTEQLLFIVLLGVYLVTVLGNLLLISLVHVDSQLHTPMYFFLCNLSLADLCFSTNIVPQALVHLLSRKKVIAFTLCAARLLFFLIFGCTQCALLAVMSYDRYVAICNPLRYPNIMTWKVCVQLATGSWTSGILVSVVDTTFILRLPYRGSNSIAHFFCEAPALLILASTDTHASEMAIFLMGVVILLIPVFLILVSYGRIIVTVVKMKSTVGSLKAFSTCGSHLMVVILFYGSAIITYMTPKSSKQQEKSVSVFYAIVTPMLNPLIYSLRNKDVKAALRKVATRNFP

SEQ ID NO: 55 - DNA, 897 bp, Homo sapiens
  CDS (1)..(894)
atgagaaatcacacaatggtgactgaattcatccttctgggaatccctgagacagagggcctagagacagcccttttattcctgttctcctcattttatttatgcaccctcttgggaaacgtgcttatccttacagctatcatctcctccactcgacttcacactcctatgtattttttcttgggaaacctctccatctttgacctgggtttctcttcaacgactgttcccaagatgttgttctacctttcggggaacagccatgctatctcgtatgcaggctgcgtgtcccagcttttcttctaccatttcctaggctgtactgagtgtttcctctacacagtgatggcctgtgaccgctttgttgccatatgttttcctttgagatacacggtcatcatgaaccacagggtgtgctttatgttggccacggggacctggatgattggctgtgtccatgccatgatcctaactcccctcaccttccagttaccttactgtggccctaacaaggtgggctattacttctgtgatattcctgcagtgttacctctagcctgtaaggacacatccttagcccagagggtaggttttacaaatgttggtcttttgtctctcatttgcttttttctcatccttgtttcctatacttgcattgggatttccatatcaaaaatccgctcagcagagggcaggcagcgggccttctccacctgcagcgctcacctcactgcaatcctttgtgcttatgggccagtcatcgttatctatctacaacccaatcccagtgccttgcttggttccataattcagatattgaataatctggtaaccccaatgttgaatccactaatctatagccttaggaataaggatgtaaaatcagatcagccctga

SEQ ID NO: 56 - protein, 298 aa, Homo sapiens
MRNHTMVTEFILLGIPETEGLETALLFLFSSFYLCTLLGNVLILTAIISSTRLHTPMYFFLGNLSIFDLGFSSTTVPKMLFYLSGNSHAISYAGCVSQLFFYHFLGCTECFLYTVMACDRFVAICFPLRYTVIMNHRVCFMLATGTWMIGCVHAMILTPLTFQLPYCGPNKVGYYFCDIPAVLPLACKDTSLAQRVGFTNVGLLSLICFFLILVSYTCIGISISKIRSAEGRQRAFSTCSAHLTAILCAYGPVIVIYLQPNPSALLGSIIQILNNLVTPMLNPLIYSLRNKDVKSDQP

SEQ ID NO: 57 - DNA, 969 bp, Homo sapiens
  CDS (1)..(963)
atgaattccctgaaggacgggaatcacaccgctctgacggggttcatcctattgggcttaacagatgatccaatccttcgagtcatcctcttcatgatcatcctatctggtaatctcagcataattattcttatcagaatttcttctcagctccatcatcctatgtatttctttctgagccacttggcttttgctgacatggcctattcatcttctgtcacacccaacatgcttgtaaacttcctggtggagagaaatacagtctcctaccttggatgtgccatccagcttggttcagcggctttctttgcaacagtcgaatgcgtccttctggctgccatggcctatgaccgctttgtggcaatttgcagtccactgctttattcaaccaaaatgtccacacaagtcagtgtccagctactcttagtagtttacatagctggttttctcattgctgtctcctatactacttccttctattttttactcttctgtggaccaaatcaagtcaatcattttttctgtgatttcgctcccttacttgaactctcctgttctgatatcagtgtctccacagttgttctctcattttcttctggatccatcattgtggtcactgtgtgtgtcatagccgtctgctacatctatatcctcatcaccatcctgaagatgcgctccactgaggggcaccacaaggccttctccacctgcacttcccacctcactgtggttaccctgttctatgggaccattaccttcatttatgtgatgcccaattttagctactcaactgaccagaacaaggtggtgtctgtgttgtacacagtggtgattcccatgttgaaccccctgatctacagcctcaggaacaaggagattaagggggctctgaagagagagcttgttagaaaaatactttctcatgatgcttgttattttagtagaacttcaaataatgatattacatag

SEQ ID NO: 58 - protein, 321 aa, Homo sapiens
MNSLKDGNHTALTGFILLGLTDDPILRVILFMIILSGNLSIIILIRISSQLHHPMYFFLSHLAFADMAYSSSVTPNMLVNFLVERNTVSYLGCAIQLGSAAFFATVECVLLAAMAYDRFVAICSPLLYSTKMSTQVSVQLLLVVYIAGFLIAVSYTTSFYFLLFCGPNQVNHFFCDFAPLLELSCSDISVSTVVLSFSSGSIIVVTVCVIAVCYIYILITILKMRSTEGHHKAFSTCTSHLTVVTLFYGTITFIYVMPNFSYSTDQNKVVSVLYTVVIPMLNPLIYSLRNKEIKGALKRELVRKILSHDACYFSRTSNNDI

SEQ ID NO: 59 - DNA, 930 bp, Homo sapiens
  CDS (1)..(927)
atggaaggaataaataaaactgcaaagatgcagtttttctttcgtccattctcacctgaccctgaggtccagatgctgatttttgtggtcttcctgatgatgtatctgaccagcctcggtggaaatgctacaattgcagtcattgttcagatcaatcattccctccacacccccatgtactttttcctggctaatctggcagttctagaaatcttctatacatcttccatcaccccattggccttggcaaacctcctttcaatgggcaaaactcctgtttccatcacgggatgtggcacccagatgtttttctttgtcttcttgggtggggctgattgtgtcctgctggtagtcatggcttatgaccagtttatagcgatctgtcaccctctgcgatacaggctcatcatgagctggtccttgtgtgtggagctgctggtaggctccttggtgctggggttcctgttgtcactgccactcaccattttaatcttccatctcccattctgccacaatgatgagatctaccacttctactgtgacatgcctgcagtcatgcgcctggcttgtgcagacacacgcgttcacaagactgctctgtatatcatcagcttcatcgtccttagcatccccctctcattgatctccatctcctatgtcttcatcgtggtagccattttacggatccggtcagcagaagggcgccagcaagcctactctacctgctcttctcacatcttagtggtcctcctgcagtatggctgcaccagctttatatacttgtcccccagttccagctactctcctgagatgggccgggtggtatctgtggcctacacatttatcactcccattttaaaccccttgatctatagtttgaggaacaaggaactgaaagatgccctaaggaaagcattgagaaaattctag

SEQ ID NO: 60 - protein, 309 aa, Homo sapiens
MEGINKTAKMQFFFRPFSPDPEVQMLIFVVFLMMYLTSLGGNATIAVIVQINHSLHTPMYFFLANLAVLEIFYTSSITPLALANLLSMGKTPVSITGCGTQMFFFVFLGGADCVLLVVMAYDQFIAICHPLRYRLIMSWSLCVELLVGSLVLGFLLSLPLTILIFHLPFCHNDEIYHFYCDMPAVMRLACADTRVHKTALYIISFIVLSIPLSLISISYVFIVVAILRIRSAEGRQQAYSTCSSHILVVLLQYGCTSFIYLSPSSSYSPEMGRVVSVAYTFITPILNPLIYSLRNKELKDALRKALRKF

SEQ ID NO: 61 - DNA, 951 bp, Homo sapiens
  CDS (1)..(948)
atggttgaagaaaatcataccatgaaaaatgagtttatcctcacaggatttacagatcaccctgagctgaagactctgctgtttgtggtgttctttgccatctatctgatcaccgtggtggggaatattagtttggtggcactgatatttacacactgtcggcttcacacaccaatgtacatctttctgggaaatctggctcttgtggattcttgctgtgcctgtgctattacccccaaaatgttagagaacttcttttctgagggcaaaaggatttccctctatgaatgtgcagtacagttttattttctttgcactgtggaaactgcagactgctttcttctggcagcagtggcctatgaccgctatgtggccatctgcaacccactgcagtaccacatcatgatgtccaagaaactctgcattcagatgaccacaggcgccttcatagctggaaatctgcattccatgattcatgtagggcttgtatttaggttagttttctgtggattgaatcacatcaaccacttttactgtgatactcttcccttgtatagactctcctgtgttgaccctttcatcaatgaactggttctattcatcttctcaggttcagttcaagtctttaccataggtagtgtcttaatatcttatctctatattcttcttactattttcagaatgaaatccaaggagggaagggccaaagccttttctacttgtgcatcccacttttcatcagtttcattattctatggatctatttttttcctatacattagaccaaatttgcttgaagaaggaggtaatgatataccagctgctattttatttacaatagtagttcccttactaaatcctttcatttatagtctgagaaacaaggaagtaataagtgtcttaagaaaaattctgctgaaaataaaatctcaaggaagtgtgaacaaatga

SEQ ID NO: 62 - protein, 316 aa, Homo sapiens
MVEENHTMKNEFILTGFTDHPELKTLLFVVFFAIYLITVVGNISLVALIFTHCRLHTPMYIFLGNLALVDSCCACAITPKMLENFFSEGKRISLYECAVQFYFLCTVETADCFLLAAVAYDRYVAICNPLQYHIMMSKKLCIQMTTGAFIAGNLHSMIHVGLVFRLVFCGLNHINHFYCDTLPLYRLSCVDPFINELVLFIFSGSVQVFTIGSVLISYLYILLTIFRMKSKEGRAKAFSTCASHFSSVSLFYGSIFFLYIRPNLLEEGGNDIPAAILFTIVVPLLNPFIYSLRNKEVISVLRKILLKIKSQGSVNK

SEQ ID NO: 63 - DNA, 939 bp, Homo sapiens
  CDS (1)..(936)
atggatcagaaaaatggaagttctttcactggatttatcctactgggtttctctgacaggcctcagctggagctagtcctctttgtggttcttttgatcttctatatcttcactttgctggggaacaaaaccatcattgtattatctcacttggacccacatcttcacactcctatgtattttttcttctccaacctaagctttttggatctgtgttacacaaccggcattgttccacagctcctggttaatctcaggggagcagacaaatcaatctcctatggtggttgtgtagttcagctgtacatctctctaggcttgggatctacagaatgcgttctttttttagtgatggtatttgaccgctatgcagctgtttgcaggcccctccactacacagtagtcatgcacccttgtctgtatgtgctgatggcttctacttcatgggtcattggttttgccaactccctattgcagacggtgctcatcttgcttttaacactttgtggaagaaataaattagaacactttctttgtgaggttcctccattgctcaagcttgcctgtgttgacactactatgaatgaatctgaactcttctttgtcagtgtcattattcttcttgtacctgttgcattaatcatattctcctatagtcagattgtcagggcagtcatgaggataaagttagcaacagggcagagaaaagtgtttgggacatgtggctcccacctcacagtggtttccctgttctacggcacagctatctatgcttacctccagcccggcaacaactactctcaggatcagggcaagttcatctctctcttctacaccatcattacacccatgatcaaccccctcatatatacactgaggaacaaggatgtgaaaggagcacttaagaaggtgctctggaagaactacgactccagatga

SEQ ID NO: 64 - protein, 312 aa, Homo sapiens [sequence omitted]

SEQ ID NO: 65 - DNA, 948 bp, Homo sapiens
  CDS (1)..(945)
atgaccaatcagacacagatgatggaattcttgcttgtgagatttactgagaattgggtgctcctgaggctgcatgctttgctcttctcactgatctacctcacggctgtgctgatgaatttagtcatcattctcctcatgattctggaccatcgtctccacatggcaatgtactttttcctccgacatttgtccttcttagacctgtgtctcatttctgccacagtccccaaatccatcctcaactctgtcgcctccactgactccatctccttcctggggtgtgtgttgcagctcttcttggtggtactgctggctggatcagagattggcatccttactgccatgtcctatgaccgctatgctgccatctgctgccccctacactgtgaggctgtcatgagcagagggctctgtgtccagttgatggctctgtcctggctcaacagaggggccttgggactcttgtacacagctggaacattctctctgaatttttatggctctgatgagctacatcagttcttctgcgatgtccctgccctactaaagctcacttgttctaaagaacatgccatcattagtgtcagtgtggccattggggtctgttatgcattttcatgtttagtttgcattgtagtttcctatgtgtacattttctctgctgtgttaaggatatcacagagacagagacaatccaaagccttttccaactgtgtgcctcacctcattgttgtcactgtgtttcttgtaacaggtgctgttgcttatttaaagccagggtctgatgcaccttctattctagacttgctggtgtctgtgttctattctgtcgcacctccaaccttgaaccctgttatctactgtctgaagaacaaggacattaaatccgctctgagtaaagtcctgtggaatgttagaagcagtggggtaatgaaagatgactaa

SEQ ID NO: 66 - protein, 315 aa, Homo sapiens
MTNQTQMMEFLLVRFTENWVLLRLHALLFSLIYLTAVLMNLVIILLMILDHRLHMAMYFFLRHLSFLDLCLISATVPKSILNSVASTDSISFLGCVLQLFLVVLLAGSEIGILTAMSYDRYAAICCPLHCEAVMSRGLCVQLMALSWLNRGALGLLYTAGTFSLNFYGSDELHQFFCDVPALLKLTCSKEHAIISVSVAIGVCYAFSCLVCIVVSYVYIFSAVLRISQRQRQSKAFSNCVPHLIVVTVFLVTGAVAYLKPGSDAPSILDLLVSVFYSVAPPTLNPVIYCLKNKDIKSALSKVLWNVRSSGVMKDD

SEQ ID NO: 67 - DNA, 921 bp, Homo sapiens
  CDS (1)..(918)
atggtgactgagtttcttcttctcggcttctcccacctggccgacctccagggcttgctcttctctgtctttctcactatctacctgctgaccgtggcaggcaatttcctcattgtggtgctggtctccactgatgctgccctccagtcccctatgtacttcttcctgcgcaccctctcggccttggagattggctatacgtctgtcacggtccccctgctacttcaccacctccttactggccggcgccacatctctcgctctggatgtgctctccagatgttcttcttcctcttctttggcgccacggagtgctgcctcctggcagccatggcctatgaccgctatgcagccatctgtgaacccctccgctacccactgctgctgagccaccgggtgtgtctacagctagctgggtcggcgtgggcctgtggggtgctggtggggctgggccacacccctttcatcttctctttgcccttctgcggccccaataccatcccgcagttcttctgtgagatccagcctgtcctgcagctggtatgtggagacacctcgcttaatgaactgcagattatcctggcaacagccctcctcatcctctgcccctttggcctcatcctgggctcctacgggcgtatcctcgttaccatcttccggatcccatctgttgcgggccgccgcaaggccttctccacctgctcctcccacctgatcgtggtctccctcttctatggcaccgcactctttatctatattcgccctaaggccagctacgatccggccactgaccctctggtgtccctcttctatgctgtggtcacccccatcctcaaccccatcatctacagcctgcggaacacagaggtcaaagctgccctaaagagaaccatccagaaaacggtgcctatggagatttga

SEQ ID NO: 68 - protein, 306 aa, Homo sapiens
MVTEFLLLGFSHLADLQGLLFSVFLTIYLLTVAGNFLIVVLVSTDAALQSPMYFFLRTLSALEIGYTSVTVPLLLHHLLTGRRHISRSGCALQMFFFLFFGATECCLLAAMAYDRYAAICEPLRYPLLLSHRVCLQLAGSAWACGVLVGLGHTPFIFSLPFCGPNTIPQFFCEIQPVLQLVCGDTSLNELQIILATALLILCPFGLILGSYGRILVTIFRIPSVAGRRKAFSTCSSHLIVVSLFYGTALFIYIRPKASYDPATDPLVSLFYAVVTPILNPIIYSLRNTEVKAALKRTIQKTVPMEI

SEQ ID NO: 69 - DNA, 978 bp, Homo sapiens
  CDS (1)..(975)
atgaccaccataattctggaagtagataatcatacagtgacaacacgtttcattcttctggggtttccaacacgaccagccttccagcttctctttttctccattttcctggcaacctatctgctgacactgctggagaatcttcttatcatcttagctatccacagtgatgggcagctgcataagcccatgtacttcttcttgagccacctctccttcctggagatgtggtatgtcacagtcatcagccccaagatgcttgttgacttcctcagtcatgacaagagtatttccttcaatggctgcatgactcaactttacttttttgtgacctttgtctgcactgagtacatccttcttgctatcatggcctttgaccgctatgtagccatttgtaatccactacgctacccagtcatcatgaccaaccagctctgtggcacactggctggaggatgctggttctgtggactcatgactgccatgattaagatggtttttatagcacaacttcactactgtggcatgcctcagatcaatcactacttttgtgatatctctccactccttaacgtctcctgtgaggatgcctcacaggctgagatggtggacttcttcttggccctcatggtcattgctattcctctttgtgttgtggtggcatcctacgctgctatccttgccaccatcctcaggatcccttctgctcagggccgccaaaaggcattctccacctgtgcctcccacctgaccgtcgtaattctcttctattccatgacacttttcacctatgcccgtcccaaactcatgtatgcctacaattccaacaaagtggtatctgttctctacactgtcattgttccactcctcaaccccatcatttactgtctgaggaaccatgaagtaaaggcagccctcagaaagaccatacattgcagaggaagtgggccccagggaaatggggctttcagtagttaa

SEQ ID NO: 70 - protein, 325 aa, Homo sapiens
MTTIILEVDNHTVTTRFILLGFPTRPAFQLLFFSIFLATYLLTLLENLLIILAIHSDGQLHKPMYFFLSHLSFLEMWYVTVISPKMLVDFLSHDKSISFNGCMTQLYFFVTFVCTEYILLAIMAFDRYVAICNPLRYPVIMTNQLCGTLAGGCWFCGLMTAMIKMVFIAQLHYCGMPQINHYFCDISPLLNVSCEDASQAEMVDFFLALMVIAIPLCVVVASYAAILATILRIPSAQGRQKAFSTCASHLTVVILFYSMTLFTYARPKLMYAYNSNKVVSVLYTVIVPLLNPIIYCLRNHEVKAALRKTIHCRGSGPQGNGAFSS

SEQ ID NO: 71 - DNA, 915 bp, Homo sapiens
  CDS (1)..(912)
atgctggctagaaacaactccttagtgactgaatttattcttgctggattaacagatcatccagagttccagcaacccctctttttcctgtttctagtggtctacattgtcaccatggtaggcaaccttggcttgatcattcttttcggtctaaattctcacctccacacaccaatgtactatttcctcttcaatctctccttcattgatctctgttactcctctgttttcactcccaaaatgctaatgaactttgtatcaaaaaagaatattatctcctatgttgggtgcatgactcagctgtttttctttctcttttttgtcatctctgaatgttacatgttgacctcaatggcatatgatcgctatgtggccatctgtaatccattgctgtataaggtcaccatgtcccatcaggtctgttctatgctcacttttgctgcttacataatgggattggctggagccacggcccacaccgggtgcatgcttagactcaccttctgcagtgctaatatcatcaaccattacttgtgtgacatactccccctcctccagctttcctgcaccagcacctatgtcaacgaggtggttgttctcattgttgtgggtattaatatcatggtacccagttgtaccatcctcatttcttatgttttcattgtcactagcattcttcatatcaaatccactcaaggaagatcaaaagccttcagtacttgtagctctcatgtcattgctctgtctctgttttttgggtcagcggcattcatgtatattaaatattcttctggatctatggagcagggaaaagtttcttctgttttctacactaatgtggtgcccatgctcaatcctctcatctacagtttgaggaacaaggatgtcaaagttgcactgaggaaagctctgatt

SEQ ID NO: 72 - protein, 304 aa, Homo sapiens
MLARNNSLVTEFILAGLTDHPEFQQPLFFLFLVVYIVTMVGNLGLIILFGLNSHLHTPMYYFLFNLSFIDLCYSSVFTPKMLMNFVSKKNIISYVGCMTQLFFFLFFVISECYMLTSMAYDRYVAICNPLLYKVTMSHQVCSMLTFAAYIMGLAGATAHTGCMLRLTFCSANIINHYLCDILPLLQLSCTSTYVNEVVVLIVVGINIMVPSCTILISYVFIVTSILHIKSTQGRSKAFSTCSSHVIALSLFFGSAAFMYIKYSSGSMEQGKVSSVFYTNVVPMLNPLIYSLRNKDVKVALRKAL

SEQ ID NO: 73 - DNA, 942 bp, Homo sapiens
  CDS (1)..(939)
atgctggctagaaacaactccttagtgactgaatttattcttgctggattaacagatcatccagagttccggcaacccctctttttcctgtttctagtgatctacattgtcaccatggtaggcaaccttggcttgatcactcttttcggtctaaattctcacctccacacaccaatgtactatttcctcttcaatctctccttcattgatctctgttactcctctgttttcactcccaaaatgctaatgaactttgtgtcaaaaaagaatattatctccaatgttgggtgcatgactcggctgtttttctttctctttttcgtcatctctgaatgttacatgttgacttcaatggcatatgatcgctatgtggccatctgtaatccattgctgtataaggtcaccatgtcccatcaggtctgttctatgctcacttttgctgcttacataatgggattggctggagccacggcccacaccgggtgcatgcttagactcaccttctgcagtgctaatatcatcaaccattacttgtgtgacatactccccctcctccagctttcctgcaccagcacctatgtcaacgaggtggttgttctcattgttgtgggtactaatatcacggtacccagttgtaccatcctcatttcttatgttttcattgtcactagcattcttcatatcaaatccactcaaggaagatcaaaagccttcagtacttgtagctctcatgtcattgctctgtctctgttttttgggtcagcggcattcatgtatattaaatattcttctggatctatggagcagggaaaagtttcttctgttttctacactaatgtggtgcccatgctcaatcccctcatctacagtttgaggaacaaggatgtcaaagttgcactgaggaaagctctgattaaaattcagaggagaaatatattctaa

SEQ ID NO: 74 - protein, 313 aa, Homo sapiens
MLARNNSLVTEFILAGLTDHPEFRQPLFFLFLVIYIVTMVGNLGLITLFGLNSHLHTPMYYFLFNLSFIDLCYSSVFTPKMLMNFVSKKNIISNVGCMTRLFFFLFFVISECYMLTSMAYDRYVAICNPLLYKVTMSHQVCSMLTFAAYIMGLAGATAHTGCMLRLTFCSANIINHYLCDILPLLQLSCTSTYVNEVVVLIVVGTNITVPSCTILISYVFIVTSILHIKSTQGRSKAFSTCSSHVIALSLFFGSAAFMYIKYSSGSMEQGKVSSVFYTNVVPMLNPLIYSLRNKDVKVALRKALIKIQRRNIF

SEQ ID NO: 75 - DNA, 969 bp, Homo sapiens
  CDS (1)..(966)
atgagccctgagaaccagagcagcgtgtccgagttcctcctcctgggcctccccatccggccagagcagcaggccgtgttcttcgccctgttcctgggcatgtacctgaccacggtgctggggaacctgctcatcatgctgctcatccagctagactctcaccttcacacccccatgtacttcttccttagccacttggccctcactgacatctccttttcatctgtcactgtccctaagatgctgatgaacatgcagactcagcacctagccgtcttttacaagggatgcatttcacagacatattttttcatattttttgctgacttagacagtttccttatcacttcaatggcatatgacaggtatgtggccatctgtcatcctctacattatgccaccatcatgactcagagccagtgtgtcatgctggtggctgggtcctgggtcatcgcttgtgcgtgtgctcttttgcataccctcctcctggcccagctttccttctgtgctgaccacatcatccctcactacttctgtgaccttggtgccctgctcaagttgtcctgctcagacacctccctcaatcagttagcaatctttacagcagcattgacagccattatgcttccattcctgtgcatcctggtttcttatggtcacattggggtcaccatcctccagattccctctaccaagggcatatgcaaagccttgtccacttgtggatcccacctctcagtggtgactatctattatcggacaattattggtctctattttcttcccccatccagcaacaccaatgacaagaacataattgcttcagtgatatacacagcagtcactcccatgttgaacccattcatttacagtctgagaaataaagacattaagggagccctaagaaaactcttgagtaggtcaggcgcagtggctcatgcctgtaatctcagcactttgggaggctga

SEQ ID NO: 76 - protein, 322 aa, Homo sapiens [sequence omitted]

SEQ ID NO: 77 - DNA, 972 bp, Homo sapiens
  CDS (1)..(969)
atgtggcagaagaatcagacctctctggcagacttcatccttgaggggctcttcgatgactcccttacccaccttttccttttctccttgaccatggtggtcttccttattgcggtgagtggcaacaccctcaccattctcctcatctgcattgatccccagcttcatacaccaatgtatttcctgctcagccagctctccctcatggatctgatgcatgtctccacaatcatcctgaagatggctaccaactacctatctggcaagaaatctatctcctttgtgggctgtgcaacccagcacttcctctatttgtgtctaggtggtgctgaatgttttctcttagctgtcatgtcctatgaccgctatgttgccatctgtcatccactgcgctatgctgtgctcatgaacaagaaggtgggactgatgatggctgtcatgtcatggttgggggcatccgtgaactccctaattcacatggcgatcttgatgcacttccctttctgtgggcctcggaaagtctaccacttctactgtgagttcccagctgttgtgaagttggtatgtggcgacatcactgtgtatgagaccacagtgtacatcagcagcattctcctcctcctccccatcttcctgatttctacatcctatgtcttcatccttcaaagtgtcattcagatgcgctcatctgggagcaagagaaatgcctttgccacttgtggctcccacctcacggtggtttctctttggtttggtgcctgcatcttctcctacatgagacccaggtcccagtgcactctattgcagaacaaagttggttctgtgttctacagcatcattacgcccacattgaattctctgatttatactctccggaataaagatgtagctaaggctctgagaagagtgctgaggagagatgttatcacccagtgcattcaacgactgcaattgtggttgccccgagtgtag

SEQ ID NO: 78 - protein, 323 aa, Homo sapiens
MWQKNQTSLADFILEGLFDDSLTHLFLFSLTMVVFLIAVSGNTLTILLICIDPQLHTPMYFLLSQLSLMDLMHVSTIILKMATNYLSGKKSISFVGCATQHFLYLCLGGAECFLLAVMSYDRYVAICHPLRYAVLMNKKVGLMMAVMSWLGASVNSLIHMAILMHFPFCGPRKVYHFYCEFPAVVKLVCGDITVYETTVYISSILLLLPIFLISTSYVFILQSVIQMRSSGSKRNAFATCGSHLTVVSLWFGACIFSYMRPRSQCTLLQNKVGSVFYSIITPTLNSLIYTLRNKDVAKALRRVLRRDVITQCIQRLQLWLPRV

SEQ ID NO: 79 - DNA, 969 bp, Homo sapiens
  CDS (1)..(966)
atgaattccctgaagcacgggaatcacaccgctctgacggggttcatcctattgggcttaacagatgatccaatccttcgagtcatcctcttcatgatcatcctatctggtaatctcagcataattattcttatcagaatttcttctcagctccatcatcctatgtatttctttctgagccacttggcttttgctgacatggcctattcatcttctgtcacacccaacatgcttgtaaacttcctggtggagagaaatacagtctcctaccttggatgtgccatccagcttggttcagcggctttctttgcaacagtcgaatgcgtccttctggctgccatggcctatgaccgctttgtggcaatttgcagtccactgctttattcaaccaaaatgtccacacaagtcagtgtccagctactcttagtagtttacatagctggttttctcattgctgtctcctatactacttccttctattttttactcttctgtggaccaaatcaagtcaatcattttttctgtgatttcgctcccttacttgaactctcctgttctgatatcagtgtctccacagttgttctctcattttcttctggatccatcattgtggtcactgtgtgtgtcatagccgtctgctacatctatatcctcatcaccatcctgaagatgcgctccactgaggggcaccacaaggctttctccacgtgcacttcccacctcactgtggttaccctgttctatgggaccattaccttcatttatgtgatgcccaattttagctactcaactgaccagaacaaggtggtgtctgtgttgtacacagtggtgattcccatgttgaaccccctgatctacagcctcaggaacaaggagattaagggggctctgaagagagagcttgttagaaaaatactttctcatgatgcttgttattttagtagaacttcaaataatgatattacatag

SEQ ID NO: 80 - protein, 322 aa, Homo sapiens
MNSLKHGNHTALTGFILLGLTDDPILRVILFMIILSGNLSIIILIRISSQLHHPMYFFLSHLAFADMAYSSSVTPNMLVNFLVERNTVSYLGCAIQLGSAAFFATVECVLLAAMAYDRFVAICSPLLYSTKMSTQVSVQLLLVVYIAGFLIAVSYTTSFYFLLFCGPNQVNHFFCDFAPLLELSCSDISVSTVVLSFSSGSIIVVTVCVIAVCYIYILITILKMRSTEGHHKAFSTCTSHLTVVTLFYGTITFIYVMPNFSYSTDQNKVVSVLYTVVIPMLNPLIYSLRNKEIKGALKRELVRKILSHDACYFSRTSNNDIT

SEQ ID NO: 81 - DNA, 936 bp, Homo sapiens
  CDS (1)..(933)
atggggactggaaatgacaccactgtggtagagtttactcttttggggttatctgaggatactacagtttgtgctattttatttcttgtgtttctaggaatttatgttgtcaccttaatgggtaatatcagcataattgtattgatcagaagaagtcatcatcttcatacacccatgtacattttcctctgccatttggcctttgtagacattgggtactcctcatcagtcacacctgtcatgctcatgagcttcctaaggaaagaaacctctctccctgttgctggttgtgtggcccagctctgttctgtagtgacgtttggtacggccgagtgcttcctgctggctgccatggcctatgatcgctatgtggccatctgctcacccctgctctactctacctgcatgtcccctggagtctgcatcatcttagtgggcatgtcctacctgggtggatgtgtgaatgcttgcacattcattggctgcttattaagactgtccttctgtgggccaaataaagtcaatcactttttctgtgactattcaccacttttgaagcttgcttgttcccatgattttacttttgaaataattccagctatctcttgtggatctatcattgtggccactgtgtgtgtcatagccatatcctacatctatatcctcatcaccatcctgaagatgcactccaccaagggccgccacaaggctttctccacgtgcacctcccacctcagtgcagtcactgtgttatatgggaccatcaccttcatttatgtgatgcccaagtccagctactcaactgaccagaacaaggtggtgtctgtgttatacaccgtggtgattcccatgttgaaccccctgatctacagcctcaggaacaaggagattaagggggctctgaagagagagcttagaataaaaatattttcttga

SEQ ID NO: 82 - protein, 311 aa, Homo sapiens
MGTGNDTTVVEFTLLGLSEDTTVCAILFLVFLGIYVVTLMGNISIIVLIRRSHHLHTPMYIFLCHLAFVDIGYSSSVTPVMLMSFLRKETSLPVAGCVAQLCSVVTFGTAECFLLAAMAYDRYVAICSPLLYSTCMSPGVCIILVGMSYLGGCVNACTFIGCLLRLSFCGPNKVNHFFCDYSPLLKLACSHDFTFEIIPAISCGSIIVATVCVIAISYIYILITILKMHSTKGRHKAFSTCTSHLSAVTVLYGTITFIYVMPKSSYSTDQNKVVSVLYTVVIPMLNPLIYSLRNKEIKGALKRELRIKIFS

SEQ ID NO: 83 - DNA, 1032 bp, Homo sapiens
  CDS (1)..(1029)
atggctctttatttttcactcatactccatggtatgagtgatcttttctttctctctacaggtcatccaagagcgagctgtaggatggaggccatgaaactattaaatcaatctcaagtgtcagaattcattttgctgggactgaccagctcccaggatgtagagtttcttctctttgccctcttctcggttatctatgtggtcacagttttgggtaaccttcttattatagtcacagtgtttaacacccctaacctgaatactcccatgtattttctccttggtaatctctcttttgtagatatgacccttgcttcttttgccacccctaaggtgattctgaacttgttaaaaaagcagaaggtaatttcttttgctgggtgcttcactcagatatttctccttcacttactgggtggggttgaaatggtactgttggtctccatggcttttgacagatatgtggccatttgtaagcccctacactacatgaccatcatgaacaagaaggtatgtgttttgcttgtagtgacctcatggctcttgggtctccttcactcagggtttcagataccatttgctgtgaacttgcccttttgtggtcccaatgtggtagacagcattttttgtgacctccctttggttactaagcttgcctgtatagacatatattttgtacaggtagtcattgttgccaacagtggcataatctccctgagctgtttcattattttgcttatctcctacagtctgatcctcataaccattaagaaccactctcctactgggcaatctaaagcccgttccactttgactgctcacatcacagtggtgattctcttctttggcccatgcatctttatctacatttggcccttcggcaaccactctgtagataagttccttgctgtgttttataccatcatcactcctatcttgaatccaattatctatactctgagaaacaaagaaatgaagatatccatgaaaaaactctggagagcttttgtgaattctagagaagatacttag

SEQ ID NO: 84 - protein, 343 aa, Homo sapiens
MALYFSLILHGMSDLFFLSTGHPRASCRMEAMKLLNQSQVSEFILLGLTSSQDVEFLLFALFSVIYVVTVLGNLLIIVTVFNTPNLNTPMYFLLGNLSFVDMTLASFATPKVILNLLKKQKVISFAGCFTQIFLLHLLGGVEMVLLVSMAFDRYVAICKPLHYMTIMNKKVCVLLVVTSWLLGLLHSGFQIPFAVNLPFCGPNVVDSIFCDLPLVTKLACIDIYFVQVVIVANSGIISLSCFIILLISYSLILITIKNHSPTGQSKARSTLTAHITVVILFFGPCIFIYIWPFGNHSVDKFLAVFYTIITPILNPIIYTLRNKEMKISMKKLWRAFVNSREDT

SEQ ID NO: 85 - DNA, 939 bp, Homo sapiens
  CDS (1)..(936)
atggatgaagccaatcactctgtggtctctgagtttgtgttcctgggactctctgactcgcggaagatccagctcctcctcttcctctttttctcagtgttctatgtatcaagcctgatgggaaatctcctcattgtgctaactgtgacctctgaccctcgtttacagtcccccatgtacttcctgctggccaacctttccatcatcaatttggtattttgttcctccacagctcccaagatgatttatgaccttttcaggaagcacaagaccatctcttttgggggctgtgtagttcagatcttctttatccatgcagttgggggaactgagatggtgctgctcatagccatggcttttgaccgatatgtggccatatgtaagcctctccactacctgaccatcatgaacccacaaaggtgcattttgtttttagtcatttcctggattataggtattattcactcagtgattcagttggcttttgttgtagacctgctgttctgtggccctaatgaattagatagtttcttttgtgatcttcctcgatttatcaaactggcttgcatagagacctacacattgggattcatggttactgccaatagtggatttatttctctggcttcttttttaattctcataatctcttacatctttattttggtgactgttcagaaaaaatcttcaggtggtatattcaaggctttctctatgctgtcagctcatgtcattgtggtggttttggtctttgggccattaatctttttctatatttttccatttcccacatcacatcttgataaattccttgccatctttgatgcagttatcactcccgttttgaatccagtcatctatacttttagaaataaagagatgatggtggcaatgagaagacgatgctctcagtttgtgaattacagtaaaatcttttaa

SEQ ID NO: 86 - protein, 312 aa, Homo sapiens
MDEANHSVVSEFVFLGLSDSRKIQLLLFLFFSVFYVSSLMGNLLIVLTVTSDPRLQSPMYFLLANLSIINLVFCSSTAPKMIYDLFRKHKTISFGGCVVQIFFIHAVGGTEMVLLIAMAFDRYVAICKPLHYLTIMNPQRCILFLVISWIIGIIHSVIQLAFVVDLLFCGPNELDSFFCDLPRFIKLACIETYTLGFMVTANSGFISLASFLILIISYIFILVTVQKKSSGGIFKAFSMLSAHVIVVVLVFGPLIFFYIFPFPTSHLDKFLAIFDAVITPVLNPVIYTFRNKEMMVAMRRRCSQFVNYSKIF

SEQ ID NO: 87 - DNA, 978 bp, Homo sapiens
  CDS (1)..(975)
atgttcctttacctttgcttcatttttcagaggacatgcagtgaggagatggaagaggaaaatgcaacattgctgacagagtttgttctcacaggatttttacatcaacctgactgtaaaataccgctcttcctggcattcttggtaatatatctcatcaccatcatggggaatcttggtctaattgttctcatctggaaagaccctcaccttcatatcccaatgtacttattccttgggagtttagcctttgtggatgcttcgttatcatccacagtgactccgaagatgctgatcaacttcttagctaagagtaagatgatatctctctctgaatgcatggtacaatttttttcccttgtaaccactgtaaccacagaatgttttctcttggcaacaatggcatatgatcgctatgtagccatttgcaaagctttactttatccagtcattatgaccaatgaactatgcattcagctattagtcttgtcatttataggtggccttcttcatgctttaatccatgaagctttttcattcagattaaccttctgtaattccaacataatacaacacttttactgtgacattatcccattgttaaagatttcctgtactgattcctctattaactttctaatggtttttattttcgcaggttctgttcaagtttttaccattggaactattcttatatcttatacaattatcctctttacaatcttagaaaagaagtctatcaaagggatacgaaaagctgtctccacctgtggggctcatctcttatctgtatctttatactatggccccctcaccttcaaatatctgggctctgcatctccgcaagcagatgaccaagatatgatggagtctctattttacactgtcatagttcctttattaaatcccatgatctacagcctgagaaacaagcaagtaatagcttcattcacaaaaatgttcaaaagcaatgtttag

SEQ ID NO: 88 - protein, 325 aa, Homo sapiens
MFLYLCFIFQRTCSEEMEEENATLLTEFVLTGFLHQPDCKIPLFLAFLVIYLITIMGNLGLIVLIWKDPHLHIPMYLFLGSLAFVDASLSSTVTPKMLINFLAKSKMISLSECMVQFFSLVTTVTTECFLLATMAYDRYVAICKALLYPVIMTNELCIQLLVLSFIGGLLHALIHEAFSFRLTFCNSNIIQHFYCDIIPLLKISCTDSSINFLMVFIFAGSVQVFTIGTILISYTIILFTILEKKSIKGIRKAVSTCGAHLLSVSLYYGPLTFKYLGSASPQADDQDMMESLFYTVIVPLLNPMIYSLRNKQVIASFTKMFKSNV

SEQ ID NO: 89 - DNA, 885 bp, Homo sapiens
  CDS (1)..(885)
atgcagactgactttgtcctgttgtgcttcagacagaatccacaggagctgaaagtactttttgttatgttcttgctcttctacattttgaccatggtgggcaacctgctcattgtagtgaccgtaactgtcagtgagaccctgggctcaccaatgtccttctttcttgctggcttaacatttatagatatcatttattcttcatccatttcccccagattgatttcagacttgttctttgggaataattccatatccttccaatctttcatggcccagctctttatcgagcacctttttggtgggtcagaggtctttctcctgttggtgatggcctatgaccgctatgtggccatctgtaagcccttgcattatttggttatcatgagacaatgggtgtgtgttttgctgctggtagtgtcctgggttggaggatttctgcaatcagtatttcaacttagcattatttatgggctcccattctgtggccccaatgtcattgatcattttttctgtgacatgtatcccttattgaaactggcctgcactgacacccatgttattggcctcttagtggtggccaatggaggactgtcttgcactattgcgtttctgctcttactcatctcttatggtgtcatcctgcactctctaaagaaacttagtcagaaagggaggcaaaaagcccactcaacctgcagttcccacatcactgtggttgtcttcttctttgttccttgtatttttatgtgtgctagacctgctaggaccttctccattgacaaatcagtgagtgtgttttatacagtcataaccccaatgctgaaccccttaatctacactctgagaaattctgagatgacaagtgctatgaagaagctttag

SEQ ID NO: 90 - protein, 294 aa, Homo sapiens
MQTDFVLLCFRQNPQELKVLFVMFLLFYILTMVGNLLIVVTVTVSETLGSPMSFFLAGLTFIDIIYSSSISPRLISDLFFGNNSISFQSFMAQLFIEHLFGGSEVFLLLVMAYDRYVAICKPLHYLVIMRQWVCVLLLVVSWVGGFLQSVFQLSIIYGLPFCGPNVIDHFFCDMYPLLKLACTDTHVIGLLVVANGGLSCTIAFLLLLISYGVILHSLKKLSQKGRQKAHSTCSSHITVVVFFFVPCIFMCARPARTFSIDKSVSVFYTVITPMLNPLIYTLRNSEMTSAMKKL

SEQ ID NO: 91 - DNA, 1014 bp, Homo sapiens
  CDS (1)..(1011)
atggaagggaaaaatcaaaccaatatctctgaatttctcctcctgggcttctcaagttggcaacaacagcaggtgctactctttgcacttttcctgtgtctctatttaacagggctgtttggaaacttactcatcttgctggccattggctcggatcactgccttcacacacccatgtatttcttccttgccaatctgtccttggtagacctctgccttccctcagccacagtccccaagatgctactgaacatccaaacccaaacccaaaccatctcctatcccggctgcctggctcagatgtatttctgtatgatgtttgccaatatggacaattttcttctcacagtgatggcatatgaccgttacgtggccatctgtcaccctttacattactccaccattatggccctgcgcctctgtgcctctctggtagctgcaccttgggtcattgccattttgaaccctctcttgcacactcttatgatggcccatctgcacttctgctctgataatgttatccaccatttcttctgtgatatcaactctctcctccctctgtcctgttccgacaccagtcttaatcagttgagtgttctggctacggtggggctgatctttgtggtaccttcagtgtgtatcctggtatcctatatcctcattgtttctgctgtgatgaaagtcccttctgcccaaggaaaactcaaggctttctctacctgtggatctcaccttgccttggtcattcttttctatggagcaaacacaggggtctatatgagccccttatccaatcactctactgaaaaagactcagccgcatcagtcatttttatggttgtagcacctgtgttgaatccattcatttacagtttaagaaacaatgaactgaaggggactttaaaaaagaccctaagccggccgggcgcggtggctcacgcctgtaatcccagcactttgggaggccgaggcgggtggatcatgaggtcaggagatcgagaccatcctggctaa

SEQ ID NO: 92 - protein, 337 aa, Homo sapiens [sequence omitted]

SEQ ID NO: 93 - DNA, 945 bp, Homo sapiens
  CDS (1)..(942)
atggccaagaataatctcaccagagtaaccgaattcattctcatgggctttatggaccaccccaaattggagattcccctctttctggtgtttctgagtttctacctagtcacccttcttgggaatgtggggatgattatgttaatccaagtagatgtcaaactctacaccccaatgtacttcttcctgagccacctctccctgctggatgcctgttacacctcagtcatcacccctcagatcctagccacattggccacaggcaaaacggtcatctcctacggccactgtgctgcccagttctttttattcaccatctgtgcaggcacagagtcgtttctgctggcagtgatggcctatgatcgctatgctgccattcgcaacccactgctctataccgtggccatgaatcccaggctctgctggagcctggtggtaggagcctatgtctgtggggtgtcaggagccatcctgcgtaccacttgcaccttcaccctctccttctgtaaggacaatcaaataaacttcttcttctgtgacctcccacccctgctgaagcttgcctgcagtgacacagcaaacatcgagattgtcatcatcttctttggcaattttgtgattttggccaatgcctccgtcatcctgatttcctatctgctcatcatcaagaccattttgaaagtgaagtcttcaggtggcagggccaagactttctccacatgtgcctctcacatcactgctgtggcccttttctttggagcccttatcttcatgtatctgcaaagtggctcaggcaaatctctggaggaagacaaagtcgtgtctgtcttctatacagtggtcatccccatgctgaaccctctgatctacagcttaagaaacaaagatgtaaaagacgccttcagaaaggtcgctaggagactccaggtgtccctgagcatgtag

SEQ ID NO: 94 - protein, 314 aa, Homo sapiens
MAKNNLTRVTEFILMGFMDHPKLEIPLFLVFLSFYLVTLLGNVGMIMLIQVDVKLYTPMYFFLSHLSLLDACYTSVITPQILATLATGKTVISYGHCAAQFFLFTICAGTESFLLAVMAYDRYAAIRNPLLYTVAMNPRLCWSLVVGAYVCGVSGAILRTTCTFTLSFCKDNQINFFFCDLPPLLKLACSDTANIEIVIIFFGNFVILANASVILISYLLIIKTILKVKSSGGRAKTFSTCASHITAVALFFGALIFMYLQSGSGKSLEEDKVVSVFYTVVIPMLNPLIYSLRNKDVKDAFRKVARRLQVSLSM

SEQ ID NO: 95 - DNA, 945 bp, Homo sapiens
  CDS (1)..(942)
atggaccagatcaaccacactaatgtgaaggagtttttcttcctggaacttacacgttcccgagagctggagtttttcttgtttgtggtcttctttgctgtgtatgtagcaacagtcctgggaaatgcactcattgtggtcactattacctgtgagtcccgcctacacactcctatgtactttctcctgcggaacaaatcagtcctggacatcgttttttcatctatcaccgtccccaagttcctggtggatcttttatcagacaggaaaaccatctcctacaatgactgcatggcacagatctttttcttccactttgctggtggggcagatatttttttcctctctgtgatggcctatgacagataccttgcaatcgccaagcccctgcactatgtgaccatgatgaggaaagaggtgtgggtggccttggtggtggcttcttgggtgagtggtggtttgcattcaatcatccaggtaattctgatgcttccattccccttctgtggccccaacacactggatgccttctactgttatgtgctccaggtggtaaaactggcctgcactgacacctttgctttggagcttttcatgatctctaacaacggactggtgaccctgctctggttcctcctgctcctgggctcctacactgtcattctggtgatgctgagatcccactctggggaggggcggaacaaggccctctccacgtgcacgtcccacatgctggtggtgactcttcacttcgtgccttgtgtttacatctactgccggcccttcatgacgctgcccatggacacaaccatatccattaataacacggtcattacccccatgctgaaccccatcatctattccctgagaaatcaagagatgaagtcagccatgcagaggctgcagaggagacttgggccttccgagagcagaaaatgggggtga

SEQ ID NO: 96 - protein, 314 aa, Homo sapiens
MDQINHTNVKEFFFLELTRSRELEFFLFVVFFAVYVATVLGNALIVVTITCESRLHTPMYFLLRNKSVLDIVFSSITVPKFLVDLLSDRKTISYNDCMAQIFFFHFAGGADIFFLSVMAYDRYLAIAKPLHYVTMMRKEVWVALVVASWVSGGLHSIIQVILMLPFPFCGPNTLDAFYCYVLQVVKLACTDTFALELFMISNNGLVTLLWFLLLLGSYTVILVMLRSHSGEGRNKALSTCTSHMLVVTLHFVPCVYIYCRPFMTLPMDTTISINNTVITPMLNPIIYSLRNQEMKSAMQRLQRRLGPSESRKWG

SEQ ID NO: 97 - DNA, 993 bp, Homo sapiens
  CDS (1)..(990)
atgttctttattattcattctttggttacttctgtttttctaacagctttgggaccccagaacagaacaatgcattttgtgactgagtttgtcctcctgggtttccatggtcaaagggagatgcagagctgcttcttctcattcatcctggttctctatctcctgacactgctagggaatggagctattgtctgtgcagtgaaattggacaggcggctccacacacccatgtacatccttctgggaaactttgcctttctagagatctggtacatttcctccactgtcccaaacatgctagtcaatatcctctctgagattaaaaccatctccttctctggttgcttcctgcaattctatttctttttttcactgggtacaacagagtgtttctttttatcagttatggcttatgatcggtacctggccatctgtcgtccattacactacccctccatcatgactgggaagttctgtataattctggtctgtgtatgctgggtaggcggatttctctgctatccagtccctattgttcttatctcccaacttcccttctgtgggcccaacatcattgaccacttggtgtgtgacccaggcccattgtttgcactggcctgcatctctgctccttccactgagcttatctgttacaccttcaactcgatgattatctttgggcccttcctctccatcttgggatcttacactctggtcatcagagctgtgctttgtattccctctggtgctggtcgaactaaagctttctccacatgtgggtcccacctaatggtggtgtctctattctatggaacccttatggtgatgtatgtgagcccaacatcagggaacccagcaggaatgcagaagatcatcactctggtatacacagcaatgactccattcttaaatccccttatctatagtcttcgaaacaaagacatgaaagatgctctaaagagagtcctggggttaacagttagccaaaactga

SEQ ID NO: 98 - protein, 330 aa, Homo sapiens
MFFIIHSLVTSVFLTALGPQNRTMHFVTEFVLLGFHGQREMQSCFFSFILVLYLLTLLGNGAIVCAVKLDRRLHTPMYILLGNFAFLEIWYISSTVPNMLVNILSEIKTISFSGCFLQFYFFFSLGTTECFFLSVMAYDRYLAICRPLHYPSIMTGKFCIILVCVCWVGGFLCYPVPIVLISQLPFCGPNIIDHLVCDPGPLFALACISAPSTELICYTFNSMIIFGPFLSILGSYTLVIRAVLCIPSGAGRTKAFSTCGSHLMVVSLFYGTLMVMYVSPTSGNPAGMQKIITLVYTAMTPFLNPLIYSLRNKDMKDALKRVLGLTVSQN

SEQ ID NO: 99 - DNA, 933 bp, Homo sapiens
  CDS (1)..(930)
atggcagagatgaacctcaccttggtgaccgagttcctccttattgcattcactgaatatcctgaatgggcactccctctcttcctcttgttattatttatgtatctcatcaccgtattggggaacttagagatgattattctgatcctcatggatcaccagctccacgctccaatgtatttccttctgagtcacctcgctttcatggacgtctgctactcatctatcactgtcccccagatgctggcagtgctgctggagcatggggcagctttatcttacacacgctgtgctgctcagttctttctgttcaccttctttggttccatcgactgctacctcttggccctcatggcctatgaccgctacttggctgtgtgccagcccctgctttatgtcaccatcctgacacagcaggcccgcttgagtcttgtggctggggcttacgttgctggtctcatcagtgccttggtgcggacagtctcagccttcactctctccttctgtggaaccagtgagattgactttattttctgtgacctccctcctctgttaaagttgacctgtggggagagctacactcaagaagtgctgattattatgtttgccatttttgtcatccctgcttccatggtggtgatcttggtgtcctacctgtttatcatcgtggccatcatggggatccctgctggaagccaggccaagaccttctccacctgcacctcccacctcactgctgtgtcactcttctttggtaccctcatcttcatgtacttgagaggtaactcagatcagtcttcggagaagaatcgggtagtgtctgtgctttacacagaggtcatccccatgttgaatcccctcatctacagcctgaggaacaaggaagtgaaggaggccctgagaaaaattctcaatagagccaagttgtcctaa

SEQ ID NO: 100 - protein, 310 aa, Homo sapiens
MAEMNLTLVTEFLLIAFTEYPEWALPLFLLLLFMYLITVLGNLEMIILILMDHQLHAPMYFLLSHLAFMDVCYSSITVPQMLAVLLEHGAALSYTRCAAQFFLFTFFGSIDCYLLALMAYDRYLAVCQPLLYVTILTQQARLSLVAGAYVAGLISALVRTVSAFTLSFCGTSEIDFIFCDLPPLLKLTCGESYTQEVLIIMFAIFVIPASMVVILVSYLFIIVAIMGIPAGSQAKTFSTCTSHLTAVSLFFGTLIFMYLRGNSDQSSEKNRVVSVLYTEVIPMLNPLIYSLRNKEVKEALRKILNRAKLS

SEQ ID NO: 101 - DNA, 936 bp, Homo sapiens
  CDS (1)..(933)
atgtccaacgccagcctactgacagcgttcatcctcatgggccttccccatgccccagcgctggacgcccccctctttggagtcttcctggtggtttacgtgctcactgtgctggggaacctcctcatcctgctggtgatcagggtggattctcacctccacaccaccatgtactacttcctcaccaacctgtcgttcattgacatgtggttctccactgtcacggtgcccaaattgctgatgactttggtgttcccaagtggcagggctatctccttccacagctgcatggctcagctctatttctttcacttcctagggggcaccgagtgtttcctctacagggtcatgtcctgtgatcgctacctggccatcagttacccgctcaggtacaccagcatgatgactgggcgctcgtgtactcttctggccaccagcacttggctcagtggctctctgcactctgctgtccaggccatattgactttccatttgccctactgtggacccaactggatccagcactatttgtgtgatgcaccgcccatcctgaaactggcctgtgcagacacctcagccatagagactgtcatttttgtgactgttggaatagtggcctcgggctgctttgtcctgatagtgctgtcctatgtgtccatcgtctgttccatcctgcggatccgcacctcagaggggaagcacagagcctttcagacctgtgcctcccactgtatcgtggtcctttgcttctttggccctggtcttttcatttacctgaggccaggctccaggaaagctgtggatggagttgtggccgttttctacactgtgctgacgccccttctcaaccctgttgtgtacaccctgaggaacaaggaggtgaagaaagctctgttgaagctgaaagacaaagtagcacattctcagagcaaatag

SEQ ID NO: 102 - protein, 311 aa, Homo sapiens
MSNASLLTAFILMGLPHAPALDAPLFGVFLVVYVLTVLGNLLILLVIRVDSHLHTTMYYFLTNLSFIDMWFSTVTVPKLLMTLVFPSGRAISFHSCMAQLYFFHFLGGTECFLYRVMSCDRYLAISYPLRYTSMMTGRSCTLLATSTWLSGSLHSAVQAILTFHLPYCGPNWIQHYLCDAPPILKLACADTSAIETVIFVTVGIVASGCFVLIVLSYVSIVCSILRIRTSEGKHRAFQTCASHCIVVLCFFGPGLFIYLRPGSRKAVDGVVAVFYTVLTPLLNPVVYTLRNKEVKKALLKLKDKVAHSQSK

SEQ ID NO: 103 - DNA, 918 bp, Homo sapiens
  CDS (1)..(912)
atgcagaggagcaatcatacagtgactgagtttatactgctgggcttcaccacagacccaggaatgcagctgggcctcttcgtggtgttcctgggcgtgtactctctcactgtggtaggaaatagcaccctcatcgtgttgatctgtaatgactcctgcctccacacacccatgtattttttcactggaaatctgtcgtttctggatctctggtattcttctgtctacaccccaaagatcctagtgacctgcatctctgaagacaaaagcatctcctttgctggctgcctgtgtcagttcttcttctctgcagggctggcctatagtgagtgctacctgctggctgccgtggcttatgaccgctacgtggccatctccaagcccctgctttatgcccaggccatgtccataaagctgtgtgcattgctggtagcagtctcatattgtggtggctttattaactcttcaatcatcaccaagaaaacgttttcctttaacttctgccgtgaaaacatcattgatgactttttctgtgatttgcttcccttggtggagctggcctgtggcgagaagggcggctataaaattatgatgtacttcctgctggcctccaatgtcatctgccccgcagtgctcatcctggcctcctacctctttatcatcaccagtgtcttgaggatctcctcctccaagggctacctcaaagccttctccacatgctcctcccacctgacctctgtcactttatactatggctccattctctacatctacgctctccccagatctagctattcttttgatatggacaaaatagtttctacattttacactgtggtattccccatgttgaatctcatgatctacagcctaaggaataaggatgtgaaagaggctctgaaaaaacttctcccataa

SEQ ID NO: 104 - protein, 304 aa, Homo sapiens
MQRSNHTVTEFILLGFTTDPGMQLGLFVVFLGVYSLTVVGNSTLIVLICNDSCLHTPMYFFTGNLSFLDLWYSSVYTPKILVTCISEDKSISFAGCLCQFFFSAGLAYSECYLLAAVAYDRYVAISKPLLYAQAMSIKLCALLVAVSYCGGFINSSIITKKTFSFNFCRENIIDDFFCDLLPLVELACGEKGGYKIMMYFLLASNVICPAVLILASYLFIITSVLRISSSKGYLKAFSTCSSHLTSVTLYYGSILYIYALPRSSYSFDMDKIVSTFYTVVFPMLNLMIYSLRNKDVKEALKKLL

SEQ ID NO: 105 - DNA, 1038 bp, Homo sapiens
  CDS (1)..(1035)
atgccgatgcagctgctgcttacagattttattatcttttccatcagattcatcatcaacagcatggaagcgagaaaccaaacagctatttcaaaattccttctcctgggactgatagaggatccggaactgcagcccgtccttttcagcctgttcctgtccatgtacttggtcaccatcctggggaacctgctcatcctcttggctgtcatctctgactctcacctccacacccccatgtacttcttcctctccaatctctcctttttggacatttgtttaagcacaaccacgatcccaaagatgctggtgaacatccaagctcagaatcggagcatcacgtactcaggctgcctcacccagatctgctttgtcttgttttttgctggcttggaaaattgtctccttgcagcaatggcctatgaccgctatgtggccatttgtcacccccttagatacacagtcatcatgaacccccgcctctgtggcctgctgattcttctctctctgttgactagtgttgtgaatgcccttcttctcagcctgatggtgttgaggctgtccttctgcacagacctggaaatcccgctcttcttctgtgaactggctcaggtcatccaactcacctgttcagacaccctcatcaataacatcctgatatattttgcagcttgcatatttggtggtgttcctctgtctggaatcattttgtcttacactcagatcacctcctgtgttttgagaatgccatcagcaagtggaaagcacaaagcagtttccacctgtgggtctcacctctccattgttctcttgttctatggggcaggtttgggggtgtacattagttctgtggttactgactcacctaggaagactgcagtggcttcagtgatgtattctgtgttccctcaaatggtgaacccctttatctatagtctgaggaataaggacatgaaaggaaccttgaggaagttcatagggaggataccttctcttctgtggtgtgccatttgctttggattcaggtttctagagtaa

SEQ ID NO: 106 - protein, 345 aa, Homo sapiens
MPMQLLLTDFIIFSIRFIINSMEARNQTAISKFLLLGLIEDPELQPVLFSLFLSMYLVTILGNLLILLAVISDSHLHTPMYFFLSNLSFLDICLSTTTIPKMLVNIQAQNRSITYSGCLTQICFVLFFAGLENCLLAAMAYDRYVAICHPLRYTVIMNPRLCGLLILLSLLTSVVNALLLSLMVLRLSFCTDLEIPLFFCELAQVIQLTCSDTLINNILIYFAACIFGGVPLSGIILSYTQITSCVLRMPSASGKHKAVSTCGSHLSIVLLFYGAGLGVYISSVVTDSPRKTAVASVMYSVFPQMVNPFIYSLRNKDMKGTLRKFIGRIPSLLWCAICFGFRFLE

SEQ ID NO: 107 - DNA, 942 bp, Homo sapiens
  CDS (1)..(939)
atgctgctgactgatagaaatacaagtgggaccacgttcaccctcttgggcttctcagattacccagaactgcaagtcccactcttcctggtttttctggccatctacaatgtcactgtgctagggaatattgggttgattgtgatcatcaaaatcaaccccaaactgcatacccccatgtactttttcctcagccaactctcctttgtggatttctgctattcctccatcattgctcccaagatgttggtgaaccttgttgtcaaagacagaaccatttcatttttaggatgcgtagtacaattctttttcttctgtacctttgtggtcactgaatcctttttattagctgtgatggcctatgaccgcttcgtggccatttgcaaccctctgctctacacagttaacatgtcccagaaactctgcgtgctgctggttgtgggatcctatgcctggggagtctcatgttccttggaactgacgtgctctgctttaaagttatgttttcatggtttcaacacaatcaatcacttcttctgtgagttctcctcactactctccctttcttgctctgatacttacatcaaccagtggctgctattctttcttgccacctttaatgaaatcagcacactactcatcgttctcacatcttatgcgttcattgttgtaaccatcctcaagatgcgttcagtcagtgggcgccgcaaagccttctccacctgtgcctcccacctgactgccatcaccatcttccatggcaccatcctcttcctttactgtgtgcccaactccaaaaactccaggcacacagtcaaagtggcctctgtgttttacaccgtggtgatccccatgttgaatcccctgatctacagtctgagaaataaagatgtcaaggatacagtcaccgagatactggacaccaaagtcttctcttactga

SEQ ID NO: 108 - protein, 313 aa, Homo sapiens
MLLTDRNTSGTTFTLLGFSDYPELQVPLFLVFLAIYNVTVLGNIGLIVIIKINPKLHTPMYFFLSQLSFVDFCYSSIIAPKMLVNLVVKDRTISFLGCVVQFFFFCTFVVTESFLLAVMAYDRFVAICNPLLYTVNMSQKLCVLLVVGSYAWGVSCSLELTCSALKLCFHGFNTINHFFCEFSSLLSLSCSDTYINQWLLFFLATFNEISTLLIVLTSYAFIVVTILKMRSVSGRRKAFSTCASHLTAITIFHGTILFLYCVPNSKNSRHTVKVASVFYTVVIPMLNPLIYSLRNKDVKDTVTEILDTKVFSY

SEQ ID NO: 109 - DNA, 987 bp, Homo sapiens
  CDS (1)..(984)
atgtttctgacagagagaaatacgacatctgaggccacattcactctcttgggcttctcagattacctggaactgcaaattcccctcttctttgtatttctggcagtctacggcttcagtgtggtagggaatcttgggatgatagtgatcatcaaaattaacccaaaattgcatacccccatgtattttttcctcaaccacctctcctttgtggatttctgctattcctccatcattgctcccatgatgctggtgaacctggttgtagaagatagaaccatttcattctcaggatgtttggtgcaattctttttcttttgcacctttgtagtgactgaattaattctatttgcggtgatggcctatgaccactttgtggccatttgcaatcctctgctctacacagttgccatctcccagaaactctgtgccatgctggtggttgtattgtatgcatggggagtcgcatgttccctgacactcgcgtgctctgctttaaagttatcttttcatggtttcaacacaatcaatcatttcttctgtgagttatcctccctgatatcactctcttaccctgactcttatctcagccagttgcttcttttcactgttgccacttttaatgagataagcacactactcatcattctgacatcttatgcattcatcattgtcaccaccttgaagatgccttcagccagtgggcaccgcaaagtcttctccacctgtgcctcccacctgactgccatcaccatcttccatggcaccatcctcttcctctactgtgtacccaactccaaaaactccaggcacacagtcaaagtggcctctgtgttttacaccgtggtgatccccttgttgaatcccctgatctacagtctgagaaataaagatgttaaggatgcaatccgaaaaataatcaatacaaaatattttcatattaaacataggcattggtatccatttaattttgttattgaacaataa

SEQ ID NO: 110 - protein, 328 aa, Homo sapiens
MFLTERNTTSEATFTLLGFSDYLELQIPLFFVFLAVYGFSVVGNLGMIVIIKINPKLHTPMYFFLNHLSFVDFCYSSIIAPMMLVNLVVEDRTISFSGCLVQFFFFCTFVVTELILFAVMAYDHFVAICNPLLYTVAISQKLCAMLVVVLYAWGVACSLTLACSALKLSFHGFNTINHFFCELSSLISLSYPDSYLSQLLLFTVATFNEISTLLIILTSYAFIIVTTLKMPSASGHRKVFSTCASHLTAITIFHGTILFLYCVPNSKNSRHTVKVASVFYTVVIPLLNPLIYSLRNKDVKDAIRKIINTKYFHIKHRHWYPFNFVIEQ

SEQ ID NO: 111 - DNA, 945 bp, Homo sapiens
  CDS (1)..(942)
atgatgatggttttaaggaatctgagcatggagcccacctttgcccttttaggtttcacagattacccaaagcttcagattcctctcttccttgtgtttctgctcatgtatgttatcacagtggtaggaaaccttgggatgatcataataatcaagattaaccccaaatttcacactcctatgtactttttccttagtcacctctcttttgttgatttttgttactcttccattgtcactcccaagctgcttgagaacttggtaatggcagataaaagcatcttctactttagctgcatgatgcagtacttcctgtcctgcactgctgtggtgacagagtctttcttgctggcagtgatggcctatgaccgctttgtggccatctgcaatcctctgctttatacagtggccatgtcacagaggctctgtgccctgctggtggctgggtcatatctctggggcatgtttggccccttggtactcctttgttatgctctccggttaaacttctctggacctaatgtaatcaaccacttcttttgtgagtatactgctctcatctctgtgtctggctctgatatactcatcccccacctgctgcttttcagcttcgccaccttcaatgagatgtgtacactactgatcatcctcacttcctatgttttcatttttgtgactgtactaaaaatccgttctgttagtgggcgccacaaagccttctccacctgggcctcccacctgacttctatcaccatcttccatgggaccatccttttcctttactgtgtacccaactccaaaaactctcggcaaacagtcaaagtggcctctgtattttacacagttgtcaaccccatgctgaaccctctgatctacagcctaaggaataaagacgtgaaggatgctttctggaagttaatacatacacaagttccatttcactga

SEQ ID NO: 112 - protein, 314 aa, Homo sapiens
MMMVLRNLSMEPTFALLGFTDYPKLQIPLFLVFLLMYVITVVGNLGMIIIIKINPKFHTPMYFFLSHLSFVDFCYSSIVTPKLLENLVMADKSIFYFSCMMQYFLSCTAVVTESFLLAVMAYDRFVAICNPLLYTVAMSQRLCALLVAGSYLWGMFGPLVLLCYALRLNFSGPNVINHFFCEYTALISVSGSDILIPHLLLFSFATFNEMCTLLIILTSYVFIFVTVLKIRSVSGRHKAFSTWASHLTSITIFHGTILFLYCVPNSKNSRQTVKVASVFYTVVNPMLNPLIYSLRNKDVKDAFWKLIHTQVPFH

SEQ ID NO: 113 - DNA, 975 bp, Homo sapiens
  CDS (1)..(972)
atgttggagagtaattacaccatgccaactgagttcctatttgttggattcacagattatctacctctcagagtcacactgttcttggtattccttctggtatatacattaactatggtcggaaatatactcttaataattctagttaatattaattcaagccttcaaattcccatgtattattttcttagcaacttatctttcttagacatcagctgttctacagcaatcactcctaaaatgctggcaaacttcttggcatccaggaaaagcatctctccttatgggtgtgcactacaaatgtttttcttcgcttcttttgctgatgctgagtgccttatcctggcagcaatggcttatgaccgctatgcagccatctgcaacccactgctctatactacactgatgtctaggagagtctgtgtctgcttcattgtgttggcatatttcagtggaagtacaacatcactggtccatgtgtgcctcacattcaggctgtcattttgtggctccaatatcgtcaatcattttttctgtgatatcccacctcttctggctttatcatgtacagacactcagatcaaccagcttctgctctttgctttgtgcagcttcatccagaccagcacttttgtggtaatatttatttcttacttctgcatcctcatcactgtgttgagcatcaagtcctcaggtggcagaagcaaaacattctccacttgtgcttcccacctcatagcagtcaccttattctatggagcgctcctgtttatgtacttacagcccaccactagctattccctagacactgataaggtggtggcagtgttttatactgttgtatttcccatgtttaatccaataatttatagtttcagaaacaaggatgtgaaaaatgctctcaaaaagctattagaaagaattggatattcaaatgaatggtatttaaatcgtttaagaatagtcaatatctaa

SEQ ID NO: 114 - protein, 324 aa, Homo sapiens
MLESNYTMPTEFLFVGFTDYLPLRVTLFLVFLLVYTLTMVGNILLIILVNINSSLQIPMYYFLSNLSFLDISCSTAITPKMLANFLASRKSISPYGCALQMFFFASFADAECLILAAMAYDRYAAICNPLLYTTLMSRRVCVCFIVLAYFSGSTTSLVHVCLTFRLSFCGSNIVNHFFCDIPPLLALSCTDTQINQLLLFALCSFIQTSTFVVIFISYFCILITVLSIKSSGGRSKTFSTCASHLIAVTLFYGALLFMYLQPTTSYSLDTDKVVAVFYTVVFPMFNPIIYSFRNKDVKNALKKLLERIGYSNEWYLNRLRIVNI

SEQ ID NO: 115 - DNA, 948 bp, Homo sapiens
  CDS (1)..(945)
atggctcctgaaaatttcaccagggtcactgagtttattctcacaggtgtctctagctgtccagagctccagattcccctcttcctggtcttcctagtgctctatgtgctgaccatggcagggaacctgggcatcatcaccctcaccagtgttgactctcgacttcaaacccccatgtactttttcctgagacatctagctatcatcaatcttggcaactctactgtcattgcccctaaaatgctgatgaactttttagtaaagaagaaaactacctcattctatgaatgtgccacccaactgggagggttcttgttctttattgtatcggaggtaatgatgctggctgtgatggcctatgaccgctatgtggccatttgtaaccctctgctctacatggtggtggtgtctcggcggctctgcctcctgctggtgtccctcacgtacctctatggcttttctacagctattgtggtttcaccttgtatattctctgtgtcttattgctcttctaatataatcaatcatttttactgtgatattgcacctctgttagcattatcttgctctgatacttacataccagaaacaatagtctttatatctgcagcaacaaatttgtttttttccatgattacagttctagtatcttatttcaatattgttttgtccattctaaggatacgttcaccagaaggaaggaaaaaagccttttccacctgcgcttcgcatatgatagcagtcacggttttctatgggacaatgctatttatgtatttgcagccccaaaccaaccactcactggatactgataagatggcttctgtgttttacacattggtgattcctatgctgaatcccttgatctacagcctgaggaataatgatgtaaatgttgccttaaagaaattcatggaaaatccatgttactcctttaaatcaatgtaa

SEQ ID NO: 116 - protein, 315 aa, Homo sapiens [sequence omitted]

SEQ ID NO: 117 - DNA, 936 bp, Homo sapiens
  CDS (1)..(933)
atgactgggggaggaaatattacagaaatcacctatttcatcctgctgggattctcagattttcccaggatcataaaagtgctcttcactatattcctggtgatctacattacatctctggcctggaacctctccctcattgttttaataaggatggattcccacctccatacacccatgtatttcttcctcagtaacctgtccttcatagatgtctgctatatcagctccacagtccccaagatgctctccaacctcttacaggaacagcaaactatcacttttgttggttgtattattcagtactttatcttttcaacgatgggactgagtgagtcttgtctcatgacagccatggcttatgatcgttatgctgccatttgtaaccccctgctctattcatccatcatgtcacccaccctctgtgtttggatggtactgggagcctacatgactggcctcactgcttctttattccaaattggtgctttgcttcaactccacttctgtgggtctaatgtcatcagacatttcttctgtgacatgccccaactgttaatcttgtcctgtactgacactttctttgtacaggtcatgactgctatattaaccatgttctttgggatagcaagtgccctagttatcatgatatcctatggctatattggcatctccatcatgaagatcacttcagctaaaggcaggtccaaggcattcaacacctgtgcttctcatctaacagctgtttccctcttctatacatcaggaatctttgtctatttgagttccagctctggaggttcttcaagctttgacagatttgcatctgttttctacactgtggtcattcccatgttaaatcccttgatttacagtttgaggaacaaagaaattaaagatgccttaaagaggttgcaaaagagaaagtgctgctga

SEQ ID NO: 118 - protein, 311 aa, Homo sapiens
MTGGGNITEITYFILLGFSDFPRIIKVLFTIFLVIYITSLAWNLSLIVLIRMDSHLHTPMYFFLSNLSFIDVCYISSTVPKMLSNLLQEQQTITFVGCIIQYFIFSTMGLSESCLMTAMAYDRYAAICNPLLYSSIMSPTLCVWMVLGAYMTGLTASLFQIGALLQLHFCGSNVIRHFFCDMPQLLILSCTDTFFVQVMTAILTMFFGIASALVIMISYGYIGISIMKITSAKGRSKAFNTCASHLTAVSLFYTSGIFVYLSSSSGGSSSFDRFASVFYTVVIPMLNPLIYSLRNKEIKDALKRLQKRKCC

SEQ ID NO: 119 - DNA, 951 bp, Homo sapiens
  CDS (1)..(948)
atggagaatgtcactacaatgaatgagtttcttctacttggcctgactggtgttcaggagctgcagcctttcttctttgggattttcttaatcatttacctgataaacttgattggaaatggatctatattggtgatggttgttttggaaccacaactccactcccctatgtatttttttctgggaaacctttcttgtctggatatttcttattcttcagtgacactgcccaagctgctcgtaaacctcgtgtgcagtcgcagggctatatcttttctaggctgtatcacccagctacacttcttccactttttgggaagcacagaggccattttactggctatcatggcctttgaccgttttgttgccatctgcaatcctcttcgctacactgtcatcatgaacccccaggtgtgtattctgttggcagctgcggcctggctcatcagcttcttttacgctctgatgcattctgtcatgactgcacacctgagtttttgtggctctcagaaactcaatcacttcttctacgatgtcaagccgctcttagaattggcctgtagtgacacattactcaatcaatggcttctttccattgtcacaggcagcatatccatgggagctttctttctgactcttctctcctgcttctatgtaattggcttccttctgtttaagaacaggtcctgcagaatactccacaaggctctgtccacttgtgcctcccattttatggtggtatgtcttttctatggacctgtgggcttcacatatattcgtcctgcttcagccacctccatgattcaggaccggataatggccatcatgtatagcgccgtcacccctgtactgaatccactaatctacacccttaggaacaaagaagtgatgatggctctgaagaaaatctttggtaggaagttgtttaaagactggcagcaacaccactag

SEQ ID NO: 120 - protein, 316 aa, Homo sapiens
MENVTTMNEFLLLGLTGVQELQPFFFGIFLIIYLINLIGNGSILVMVVLEPQLHSPMYFFLGNLSCLDISYSSVTLPKLLVNLVCSRRAISFLGCITQLHFFHFLGSTEAILLAIMAFDRFVAICNPLRYTVIMNPQVCILLAAAAWLISFFYALMHSVMTAHLSFCGSQKLNHFFYDVKPLLELACSDTLLNQWLLSIVTGSISMGAFFLTLLSCFYVIGFLLFKNRSCRILHKALSTCASHFMVVCLFYGPVGFTYIRPASATSMIQDRIMAIMYSAVTPVLNPLIYTLRNKEVMMALKKIFGRKLFKDWQQHH

SEQ ID NO: 121 - DNA, 951 bp, Homo sapiens
  CDS (1)..(948)
atggaggctgccaatgagtcttcagagggaatctcattcgttttattgggactgacaacaagtcctggacagcagcggcctctctttgtgctgttcttgctcttgtatgtggccagcctcctgggtaatggactcattgtggctgccatccaggccagtccagcccttcatgcacccatgtacttcctgctggcccacctgtcctttgctgacctctgtttcgcctccgtcactgtgcccaagatgttggccaacttgttggcccatgaccactccatctcgctggctggctgcctgacccaaatgtacttcttctttgccctgggggtaactgatagctgtcttctggcggccatggcctatgactgctacgtggccatccggcaccccctcccctatgccacgaggatgtcccgggccatgtgcgcagccctggtgggaatggcatggctggtgtcccacgtccactccctcctgtatatcctgctcatggctcgcttgtccttctgtgcttcccaccaagtgccccacttcttctgtgaccaccagcctctcttaaggctctcgtgctctgacacccaccacatccagctgctcatcttcaccgagggcgccgcagtggtggtcactcccttcctgctcatcctcgcctcctatggggccatcgcagctgccgtgctccagctgccctcagcctctgggaggctccgggctgtgtccacctgtggctcccacctggctgtggtgagcctcttctatgggacagtcattgcagtctacttccaggccacatcccgacgcgaggcagagtggggccgtgtggccactgtcatgtacactgtagtcacccccatgctgaaccccatcatctacagcctctggaatcgcgatgtacagggggcactccgagcccttctcattgggcgaaggatctcagctagtgactcctga

SEQ ID NO: 122 - protein, 316 aa, Homo sapiens
MEAANESSEGISFVLLGLTTSPGQQRPLFVLFLLLYVASLLGNGLIVAAIQASPALHAPMYFLLAHLSFADLCFASVTVPKMLANLLAHDHSISLAGCLTQMYFFFALGVTDSCLLAAMAYDCYVAIRHPLPYATRMSRAMCAALVGMAWLVSHVHSLLYILLMARLSFCASHQVPHFFCDHQPLLRLSCSDTHHIQLLIFTEGAAVVVTPFLLILASYGAIAAAVLQLPSASGRLRAVSTCGSHLAVVSLFYGTVIAVYFQATSRREAEWGRVATVMYTVVTPMLNPIIYSLWNRDVQGALRALLIGRRISASDS

SEQ ID NO: 123 - DNA, 954 bp, Homo sapiens
  CDS (1)..(951)
atgagaaatttgagtggaggccatgtcgaggagtttgtcttggtgggtttccctaccacgcctcccctccagctgctcctctttgtccttttttttgcaatttaccttctgacattgttggagaatgcacttattgtcttcacaatatggcttgctccaagccttcatcgtcccatgtactttttccttggccatctctctttcctggagctatggtacatcaatgtcaccattcctcggctcttggcagcctttcttacccaggatggtagagtctcctacgtaggttgcatgacccaactgtacttctttattgccttagcctgtactgaatgtgtgctgttggcagttatggcctatgatcgctacctggccatctgtggacccctcctttaccctagtctcatgccttccagtctggccactcgccttgctgctgcctcttggggcagtggcttcttcagctccatgatgaagcttctttttatttcccaattgtcctactgtggacccaacattatcaaccactttttctgtgatatttccccactactcaacctcacctgctctgacaaggagcaagcagagctagtagacttccttctggccctggtgatgattctactccctctattggctgtggtttcatcatacactgccatcattgcagccatcctgaggatccctacgtccaggggacgccacaaagccttttccacttgtgccgctcatctggcagtggttgttatctactactcctccactctcttcacctatgcacggccccgggccatgtacaccttcaaccacaacaagattatctctgtgctctacactatcattgtaccattcttcaacccagccatctactgcctgaggaacaaggaggtgaaggaggccttcaggaagacagtgatgggcagatgtcactatcctagggatgttcaggactga

SEQ ID NO: 124 - protein, 317 aa, Homo sapiens
MRNLSGGHVEEFVLVGFPTTPPLQLLLFVLFFAIYLLTLLENALIVFTIWLAPSLHRPMYFFLGHLSFLELWYINVTIPRLLAAFLTQDGRVSYVGCMTQLYFFIALACTECVLLAVMAYDRYLAICGPLLYPSLMPSSLATRLAAASWGSGFFSSMMKLLFISQLSYCGPNIINHFFCDISPLLNLTCSDKEQAELVDFLLALVMILLPLLAVVSSYTAIIAAILRIPTSRGRHKAFSTCAAHLAVVVIYYSSTLFTYARPRAMYTFNHNKIISVLYTIIVPFFNPAIYCLRNKEVKEAFRKTVMGRCHYPRDVQD

SEQ ID NO: 125 - DNA, 930 bp, Homo sapiens
  CDS (1)..(927)
atgaagatcaaccagacaatcctgaaggaattcattcttgttggcttttctgtgtacccacatgtacagacatttctttttgtggtcttcttttgtctctaccttctcacccttgcaggtaatctgatcatcatgggtctaacttgggtggacaggtccctccacacccctatgtatctcttccttagtgcactctccttctctgagacctgctatacgctgaccatcgtccccaagatgctggaagatctactggccaaggacagaagcatttcagtcacaggttgtagcttacagatgtgcttcttcttgggacttggtggcacaaactgtatcattctcactttgatgggatatgaccgcttcctggccatctgtaaccctctaagatatccactgcttatgaccaacattgtatgtggacaacttgtggcctctgcttgcactgcaggcttctttatctctcttacagagactgcactgatattcagggactctttctgcagacccaaccttgtcaaacacttcttctgccatatgctggcagttattaggctgtcttgtatagacagtaaccacacagaattcattataacactgatctcagtgtctggtttgctgggtacccttctgctcatcatcctgactgatgtcttcattatttctactgtcctcaggatcccttcagctgagggcaagcagaaggccttcaccacctgtgcctcccacctcaccgtggttataatccactttggttttgcatctattgtttatttgaagccagaagcctcaggagatgacacactcatagcagtcccttatactgtcattacccccttcctcagccccatcatattcagcctgaggaataaggacatgaaaaatgcttttagaagaatgatgggaaacacagttgccttgaaaaaataa

SEQ ID NO: 126 - protein, 309 aa, Homo sapiens
MKINQTILKEFILVGFSVYPHVQTFLFVVFFCLYLLTLAGNLIIMGLTWVDRSLHTPMYLFLSALSFSETCYTLTIVPKMLEDLLAKDRSISVTGCSLQMCFFLGLGGTNCIILTLMGYDRFLAICNPLRYPLLMTNIVCGQLVASACTAGFFISLTETALIFRDSFCRPNLVKHFFCHMLAVIRLSCIDSNHTEFIITLISVSGLLGTLLLIILTDVFIISTVLRIPSAEGKQKAFTTCASHLTVVIIHFGFASIVYLKPEASGDDTLIAVPYTVITPFLSPIIFSLRNKDMKNAFRRMMGNTVALKK

SEQ ID NO: 127 - DNA, 969 bp, Homo sapiens
  CDS (1)..(963)
atggagccccaaaatacctccactgtgactaactttcagctgttaggattccagaaccttcttgaatggcaggccctgctctttgtcattttcctgctcatctactgcctgaccattatagggaatgttgtcatcatcaccgtggtgagccagggcctgcgactgcactcccctatgtacatgttcctccagcatctctcctttctggaggtctggtacacgtccaccactgtgccccttctcctagccaacctgctgtcctggggccaagccatctccttctctgcctgcatggcacagctctacttcttcgtattcctcggcgccaccgagtgctttctcctggccttcatggcctatgaccgttacctggccatctgcagcccactccgctacccctttctcatgcatcgtgggctatgtgccaggttggtggtggtctcatggtgcacaggggtcagcacaggctttctgcattccatgatgatttccaggttggacttctgtgggcgcaatcagattaaccatttcttctgcgacctcccgccactcatgcagctctcctgttccagagtttatatcaccgaggtgaccatcttcatcctgtcaattgccgtgctgtgcatttgtttttttctgacactggggccctatgttttcattgtgtcctccatattgagaatcccttccacctctggccggagaaagaccttttccacatgtggctcccacctggctgttgtcactctctactacgggaccatgatctccatgtatgtgtgtcccagtccccacctgttgcctgaaatcaacaagatcatttctgtcttctacactgtggtcacaccactgctgaacccagttatctacagcttgaggaacaaagacttcaaagaagctgttagaaaggtcatgagaaggaaatgtggtattctatggagtacaagtaaaaggaagttcctttattag

SEQ ID NO: 128 - protein, 321 aa, Homo sapiens
MEPQNTSTVTNFQLLGFQNLLEWQALLFVIFLLIYCLTIIGNVVIITVVSQGLRLHSPMYMFLQHLSFLEVWYTSTTVPLLLANLLSWGQAISFSACMAQLYFFVFLGATECFLLAFMAYDRYLAICSPLRYPFLMHRGLCARLVVVSWCTGVSTGFLHSMMISRLDFCGRNQINHFFCDLPPLMQLSCSRVYITEVTIFILSIAVLCICFFLTLGPYVFIVSSILRIPSTSGRRKTFSTCGSHLAVVTLYYGTMISMYVCPSPHLLPEINKIISVFYTVVTPLLNPVIYSLRNKDFKEAVRKVMRRKCGILWSTSKRKFL

SEQ ID NO: 129 - DNA, 870 bp, Homo sapiens
  CDS (1)..(867)
atggaaaatgggagctatacctcttatttcattctcctaggactctttaaccacaccagagcccaccaagtcctcttcatgatggttctgagtatcgttttgacctccctgtttggcaattccctcatgattctcctgattcactgggaccaccggttccacacgcccatgtacttcctcctgagccaactttccctcatggacgtgatgctggtttccaccactgtgcccaaaatggcggctgactacttgaccggaagtaaggccatctcccgcgctggctgtggtgcgcagatcttcttcctccccacactgggtggtggagagtgcttcctcttagcagccatggcctatgaccgctatgcggctgtctgccacccactccgatatcccactctcatgagctggcagctgtgcctgaggatgaacctgtcgtgttggctcctgggtgcagctgacgggctcctgcaggctgttgctaccctgagcttcccatattgcggtgcacacgagatcgatcacttcttctgcgagacccccgtgctggtgcgtttggcttgtgctgacacttcagtcttcgaaaacgccatgtacatctgctgtgtgttaatgctcctggtccccttttccctcatcctgtcctcctatggtctcatcctcgctgctgttctgcacatgcgctctacagaagcccgcaagaaggcctttgccacctgctcttcacatgtggctgtggtgggactcttttatggagctgccatttttacctatatgagacccaaatcccacaggtccactaaccacgacaaggttgtgtcagccttctatactatgttcacccctttactaaaccccctcatctacagtgtg

SEQ ID NO: 130 - protein, 289 aa, Homo sapiens
MENGSYTSYFILLGLFNHTRAHQVLFMMVLSIVLTSLFGNSLMILLIHWDHRFHTPMYFLLSQLSLMDVMLVSTTVPKMAADYLTGSKAISRAGCGAQIFFLPTLGGGECFLLAAMAYDRYAAVCHPLRYPTLMSWQLCLRMNLSCWLLGAADGLLQAVATLSFPYCGAHEIDHFFCETPVLVRLACADTSVFENAMYICCVLMLLVPFSLILSSYGLILAAVLHMRSTEARKKAFATCSSHVAVVGLFYGAAIFTYMRPKSHRSTNHDKVVSAFYTMFTPLLNPLIYS

SEQ ID NO: 131 - DNA, 963 bp, Homo sapiens
  CDS (1)..(960)
atggaaaggaccaacgattccacgtcgacagaatttttcctggtagggctttctgcccacccaaagctccagacagttttcttcgttctaattttgtggatgtacctgatgatcctgcttggaaatggagtccttatctcagttatcatctttgattctcacctgcacacccccatgtatttcttcctctgtaatctttccttcctcgacgtttgctacacaagttcctctgtcccactaattcttgccagctttctggcagtaaagaaaaaggtttccttctctgggtgtatggtgcaaatgtttatttcttttgccatgggggccacggagtgcatgatcttaggcacgatggcactggaccgctatgtggccatctgctacccactgagataccctgtcatcatgagcaagggtgcctatgtggccatggcagctgggtcctgggtcactgggcttgtggactcagtagtgcagacagcttttgcaatgcagttaccattctgtgctaataatgtcattaaacattttgtctgtgaaattctggctatcttgaaactggcctgtgctgatatttcaatcaatgtgattagtatgacagggtcgaatctgattgttctggttattccattgttagtaatttccatctcttacatatttattgttgccactattctgaggattccttccactgaaggaaaacataaggccttctccacctgctcagcccacctgacagtggtgattatattctatggaaccatcttcttcatgtacgcaaagcctgagtctaaagcctctgttgattcaggtaatgaagacatcattgaggccctcatctcccttttctatggagtgatgactcccatgcttaatcctctcatctatagtctgcgaaacaaggatgtaaaggctgctgtcaaaaacatactgtgtaggaaaaacttttctgatggaaaatga

SEQ ID NO: 132 - protein, 320 aa, Homo sapiens
MERTNDSTSTEFFLVGLSAHPKLQTVFFVLILWMYLMILLGNGVLISVIIFDSHLHTPMYFFLCNLSFLDVCYTSSSVPLILASFLAVKKKVSFSGCMVQMFISFAMGATECMILGTMALDRYVAICYPLRYPVIMSKGAYVAMAAGSWVTGLVDSVVQTAFAMQLPFCANNVIKHFVCEILAILKLACADISINVISMTGSNLIVLVIPLLVISISYIFIVATILRIPSTEGKHKAFSTCSAHLTVVIIFYGTIFFMYAKPESKASVDSGNEDIIEALISLFYGVMTPMLNPLIYSLRNKDVKAAVKNILCRKNFSDGK

SEQ ID NO: 133 - DNA, 933 bp, Homo sapiens
  CDS (1)..(930)
aattacaatcaatcatcaactgatttcatcttattaggattcttcccaccatcaagaattggccttttcctcttcatcctcattgttttcattttcctaatggctctaattggaaacctatccatgattcttctcatcttcttggacacccatctccacacacccatgtatttcctacttagtcagctctccctcattgacctaaattacatctccaccattgttcctaagatggcatctgattttctgtctggtaacaagtctatctccttcactgggtgtgggattcagagtttcttcttctcggcattaggaggtgcagaagcactacttttggcatctatggcctatgatcgttacattgctatttgctttcctcttcactatcccatccgcatgagcaaaagaatgtgtgtgctgatgataacagggtcttggatcataggctcgatcaatgcttgtgctcacactgtatatgtactccatattccttattgccaatccagggccatcaatcatttcttctgtgatgtcccagcaatggtgactctggcctgcatggacacctgggtctatgagggcacagtgtttttgagcaccaccatctttctcgtgtttcccttcattgctatttcatgttcctatggccgggttctccttgctgtctaccacatgaaatctgcagaagggaggaagaaagcctacctgacctgcagcacccacctcactgtagtaactttctactatgcaccttttgtctacacttatctacgtccaagatccctgcgatctccaacagaggacaaggttctggctgtcttctacaccatcctcaccccaatgctcaaccccatcatctatagcctgaggaacaaggaggtgatgggggccctgacacgagtgagtcagagaatctgctctgtgaaaatgtag

SEQ ID NO: 134 - protein, 310 aa, Homo sapiens
NYNQSSTDFILLGFFPPSRIGLFLFILIVFIFLMALIGNLSMILLIFLDTHLHTPMYFLLSQLSLIDLNYISTIVPKMASDFLSGNKSISFTGCGIQSFFFSALGGAEALLLASMAYDRYIAICFPLHYPIRMSKRMCVLMITGSWIIGSINACAHTVYVLHIPYCQSRAINHFFCDVPAMVTLACMDTWVYEGTVFLSTTIFLVFPFIAISCSYGRVLLAVYHMKSAEGRKKAYLTCSTHLTVVTFYYAPFVYTYLRPRSLRSPTEDKVLAVFYTILTPMLNPIIYSLRNKEVMGALTRVSQRICSVKM

SEQ ID NO: 135 - DNA, 954 bp, Homo sapiens
  CDS (1)..(951)
atggggatggtgagacataccaatgagagcaacctagcaggtttcatccttttagggttttctgattatcctcagttacagaaggttctatttgtgctcatattgattctgtatttactaactattttggggaataccaccatcattctggtttctcgtctggaacccaagcttcatatgccgatgtatttcttcctttctcatctctccttcctgtaccgctgcttcaccagcagtgttattccccagctcctggtaaacctgtgggaacccatgaaaactatcgcctatggtggctgtttggttcacctttacaactcccatgccctgggatccactgagtgcgtcctcccggctctgatgtcctgtgaccgctatgtggctgtctgccgtcctctccattacactgtcttaatgcatatccatctctgcatggccttggcatctatggcatggctcagtggaatagccaccaccctggtacagtccaccctcaccctgcagctgcccttctgtgggcatcgccaagtggatcatttcatctgcgaggtccctgtgctcatcaagctggcttgtgtgggcaccacgtttaacgaggctgagctttttgtggctagtatccttttccttatagtgcctgtctcattcatcctggtctcctctggctacattgcccacgcagtgttgaggattaagtcagctaccaggagacagaaagcattcgggacctgcttctcccacctgacagtggtcaccatcttttatggaaccatcatcttcatgtatctgcagccagccaagagtagatccagggaccagggcaagtttgtttctctcttctacactgtggtaacccgcatgcttaaccctcttatttataccttgaggatcaaggaggtgaaaggggcattaaagaaagttctagcaaaggctctgggagtaaatattttatga

SEQ ID NO: 136 - protein, 317 aa, Homo sapiens
MGMVRHTNESNLAGFILLGFSDYPQLQKVLFVLILILYLLTILGNTTIILVSRLEPKLHMPMYFFLSHLSFLYRCFTSSVIPQLLVNLWEPMKTIAYGGCLVHLYNSHALGSTECVLPALMSCDRYVAVCRPLHYTVLMHIHLCMALASMAWLSGIATTLVQSTLTLQLPFCGHRQVDHFICEVPVLIKLACVGTTFNEAELFVASILFLIVPVSFILVSSGYIAHAVLRIKSATRRQKAFGTCFSHLTVVTIFYGTIIFMYLQPAKSRSRDQGKFVSLFYTVVTRMLNPLIYTLRIKEVKGALKKVLAKALGVNIL

SEQ ID NO: 137 - DNA, 957 bp, Homo sapiens
  CDS (1)..(954)
atggaagagtacaacacatcctctacagacttcactttcatggggctgttcaacagaaaggaaacctcaggtcttatttttgccatcatctctatcatcttcttcaccgcactgatggccaatggggttatgatcttcctgatccaaacagatttgcgccttcatacacccatgtacttcctcctcagccacctttccttaattgacatgatgtatatttccactattgtgcctaagatgctggttaattacctgctggatcaaaggaccatttcctttgtggggtgcacagctcaacacttcctctaccttacccttgtgggagctgaattcttcctgctgggcctcatggcctatgaccgctatgtggccatttgcaaccctctgagataccctgtcctcatgagccgccgggtctgttggatgattatagcaggttcctggtttgggggctctttggatggcttcctcctaacccccatcaccatgagctttcccttctgcaattcccgggagattaaccacttcttctgtgaggcaccagcagtcctgaagttggcatgtgcagacacagccctctacgagacagtgatgtatgtgtgctgtgttttgatgctgctgattcctttctctgtagtccttgcttcctatgcccgaatcctgactacagttcagtgcatgagctcagtggagggcaggaagaaggcatttgccacttgctcatcccacatgactgtggtgtccttgttctacggggctgccatgtacacctacatgctgccacattcttaccacaagccagcccaggacaaagtcctctctgtgttttacaccattctcacacccatgctgaaccccctcatctacagccttagaaacaaggatgtgactggagctctgaagagggccttggggaggttcaagggtcctcaaagggtgtcaggaggtgtcttttga

SEQ ID NO: 138 - protein, 318 aa, Homo sapiens
MEEYNTSSTDFTFMGLFNRKETSGLIFAIISIIFFTALMANGVMIFLIQTDLRLHTPMYFLLSHLSLIDMMYISTIVPKMLVNYLLDQRTISFVGCTAQHFLYLTLVGAEFFLLGLMAYDRYVAICNPLRYPVLMSRRVCWMIIAGSWFGGSLDGFLLTPITMSFPFCNSREINHFFCEAPAVLKLACADTALYETVMYVCCVLMLLIPFSVVLASYARILTTVQCMSSVEGRKKAFATCSSHMTVVSLFYGAAMYTYMLPHSYHKPAQDKVLSVFYTILTPMLNPLIYSLRNKDVTGALKRALGRFKGPQRVSGGVF

SEQ ID NO: 139 - DNA, 975 bp, Homo sapiens
  CDS (1)..(972)
atgggcatggagggtcttctccagaactccactaacttcgtcctcacaggcctcatcacccatcctgccttccccgggcttctctttgcaatagtcttctccatctttgtggtggctataacagccaacttggtcatgattctgctcatccacatggactcccgcctccacacacccatgtacttcttgctcagccagctctccatcatggataccatctacatctgtatcactgtccccaagatgctccaggacctcctgtccaaggacaagaccatttccttcctgggctgtgcagttcagatcttcctctacctgaccctgattggaggggaattcttcctgctgggtctcatggcctatgaccgctatgtggctgtgtgcaaccctctacggtaccctctcctcatgaaccgcagggtttgcttattcatggtggtcggctcctgggttggtggttccttggatgggttcatgctgactcctgtcactatgagtttccccttctgtagatcccgagagatcaatcactttttctgtgagatcccagccgtgctgaagttgtcttgcacagacacgtcactctatgagaccctgatgtatgcctgctgcgtgctgatgctgcttatccctctatctgtcatctctgtctcctacacgcacatcctcctgactgtccacaggatgaactctgctgagggccggcgcaaagcctttgctacgtgttcctcccacattatggtggtgagcgttttctacggggcagccttctacaccaacgtgctgccccactcctaccacactccagagaaagataaagtggtgtctgccttctacaccatcctcacccccatgctcaacccactcatctacagcttgaggaataaagatgtggctgcagctctgaggaaagtactagggagatgtggttcctcccagagcatcagggtggcgactgtgatcaggaagggctag

SEQ ID NO: 140 - protein, 324 aa, Homo sapiens
MGMEGLLQNSTNFVLTGLITHPAFPGLLFAIVFSIFVVAITANLVMILLIHMDSRLHTPMYFLLSQLSIMDTIYICITVPKMLQDLLSKDKTISFLGCAVQIFLYLTLIGGEFFLLGLMAYDRYVAVCNPLRYPLLMNRRVCLFMVVGSWVGGSLDGFMLTPVTMSFPFCRSREINHFFCEIPAVLKLSCTDTSLYETLMYACCVLMLLIPLSVISVSYTHILLTVHRMNSAEGRRKAFATCSSHIMVVSVFYGAAFYTNVLPHSYHTPEKDKVVSAFYTILTPMLNPLIYSLRNKDVAAALRKVLGRCGSSQSIRVATVIRKG

SEQ ID NO: 141 - DNA, 940 bp, Homo sapiens
  CDS (1)..(939)
atgtgctcagggaatcagacttctcagaatcaaacagcaagcactgatttcaccctcacgggactctttgctgagagcaagcatgctgccctcctctacaccgtgaccttccttcttttcttgatggccctcactgggaatgccctcctcatcctcctcatccactcagagccccgcctccacacccccatgtacttcttcatcagccagctcgcgctcatggatctcatgtacctatgcgtgactgtgcccaagatgcttgtgggccaggtcactggagatgataccatttccccgtcaggctgtgggatccagatgttcttctacctgaccctggctggagctgaggttttcctcctggctgccatggcctatgaccgatatgctgctgtttgcagacctctccattacccactgctgatgaaccagagggtgtgccagctcctggtgtcagcctgctgggttttgggaatggttgatggtttgttgctcacccccattaccatgagcttccccttttgccagtctaggaaaatcctgagttttttctgtgagactcctgccctgctgaagctctcctgctctgacgtctccctctataagacgctcatgtacctgtgctgcatcctcatgcttctcgcccccatcatggtcatctccagctcatacaccctcatcctgcatctcatccacaggatgaattctgccgccggccacaggaaggccttggccacctgctcctcccacatgatcatagtgctgctgctcttcggtgcttccttctacacctacatgctcccgagttcctaccacacagctgagcaggacatgatggtgtctgccttttacaccatcttcactcctgtgctgaaccccctcatttacagtctccgcaacaaagatgtcaccagggctatgaggagcatgatgcagtcaagaa

SEQ ID NO: 142 - protein, 313 aa, Homo sapiens
MCSGNQTSQNQTASTDFTLTGLFAESKHAALLYTVTFLLFLMALTGNALLILLIHSEPRLHTPMYFFISQLALMDLMYLCVTVPKMLVGQVTGDDTISPSGCGIQMFFYLTLAGAEVFLLAAMAYDRYAAVCRPLHYPLLMNQRVCQLLVSACWVLGMVDGLLLTPITMSFPFCQSRKILSFFCETPALLKLSCSDVSLYKTLMYLCCILMLLAPIMVISSSYTLILHLIHRMNSAAGHRKALATCSSHMIIVLLLFGASFYTYMLPSSYHTAEQDMMVSAFYTIFTPVLNPLIYSLRNKDVTRAMRSMMQSR

SEQ ID NO: 143 - DNA, 975 bp, Homo sapiens
  CDS (1)..(972)
atggagagccccaatcgaaccaccattcaggagtttatcttctccgctttcccttattcctgggttaagtctgttgtctgctttgttccactgctcttcatctatgctttcattgttgttggaaacctggtcatcatcacagtggtccagttgaatactcacctccacactcccatgtatacttttatcagtgctctttctttcctggagatttggtataccacagccacaatcccaaagatgctgtctagcctgcttagtgagaggagcatttccttcaatggttgtctcctgcagatgtatttcttccattccaccggcatctgtgaggtgtgtctcttgacagttatggcctttgaccactacctggccatatgcagccctcttcattatccctctatcatgacccccaagctatgtacccaactgactttaagttgctgtgtttgtggctttatcacaccccttcctgagattgcctggatctctacactgccattttgtggttcgaatcaccttgaacatatcttctgtgacttcctcccagtgctgcgtctggcctgcacagacacacgagccatcgtcatgattcaggtagtggatgtcattcatgcagtggagattattacagctgtgatgctcatcttcatgtcctacgatggtattgtggctgtaattctacgtattcattcagctggaggccgccgcacagcattttccacgtgtgtctctcacttcattgtcttttcgctcttctttggcagtgtgactctcatgtacctacgcttctctgccacctactctttgttctgggatatagccattgctctggcctttgcagttttgtctcccttcttcaaccccattatctatagcctgaggaataaagaaataaaagaagctataaaaaagcacataggtcaagctaagatatttttttccgtaagaccagggacctcaagtaagatattttag

SEQ ID NO: 144 - protein, 324 aa, Homo sapiens
MESPNRTTIQEFIFSAFPYSWVKSVVCFVPLLFIYAFIVVGNLVIITVVQLNTHLHTPMYTFISALSFLEIWYTTATIPKMLSSLLSERSISFNGCLLQMYFFHSTGICEVCLLTVMAFDHYLAICSPLHYPSIMTPKLCTQLTLSCCVCGFITPLPEIAWISTLPFCGSNHLEHIFCDFLPVLRLACTDTRAIVMIQVVDVIHAVEIITAVMLIFMSYDGIVAVILRIHSAGGRRTAFSTCVSHFIVFSLFFGSVTLMYLRFSATYSLFWDIAIALAFAVLSPFFNPIIYSLRNKEIKEAIKKHIGQAKIFFSVRPGTSSKIF

SEQ ID NO: 145 - DNA, 954 bp, Homo sapiens
  CDS (1)..(951)
atggatcaatacaaccattcaagcctggctgaatttgtgttccttggctttgccagtgtgggctatgtcaggggctggctttttgtcctgctgctattggcatacctgttcaccatctgtggtaacatgctcatcttctcagtcatccgactggatgcagctctgcacacacctatgtaccactttgtcagtgttctttccttcttggagttgtggtatacagctaccactatccctaagatgttgtctaatattctcagtgagaagaaaaccatttcttttgcaggatgcctccttcagacctacttcttccactccttgggagcgtctgaatgctaccttcttacagccatggcctatgatagatacctggccatttgtcggcccctccactaccctataattatgaccaccacactctgtgccaagatggctgctgcttgttggacttgtggcttcctgtgtcccatttctgaggtcatccttgcctcccagctcccattttgtgcttacaatgaaatccaacacattttctgtgactttccacctttgctgagcttggcctgcaaggacacatctgctaacattctggtggactttgccattaatgctttcataattcttatcactttcttctttatcatgatttcttatgcaaggatcattggggctgtgctgaagataaaaacagcatcaggaagaaagaaggccttttctacctgtgcctcacatcttgctgtggtcctcatcttctttgggagcatcatcttcatgtatgtgcggctaaagaagagctattccctgacccttgaccgaacacttgctatagtttactccgtactaacaccaatggtcaatccaattatctacagtcttcgtaacaaggaaatcattaaagctatcaagaggaccatcttccagaagggagataaagctagtcttgctcatctttga

SEQ ID NO: 146 - protein, 317 aa, Homo sapiens
MDQYNHSSLAEFVFLGFASVGYVRGWLFVLLLLAYLFTICGNMLIFSVIRLDAALHTPMYHFVSVLSFLELWYTATTIPKMLSNILSEKKTISFAGCLLQTYFFHSLGASECYLLTAMAYDRYLAICRPLHYPIIMTTTLCAKMAAACWTCGFLCPISEVILASQLPFCAYNEIQHIFCDFPPLLSLACKDTSANILVDFAINAFIILITFFFIMISYARIIGAVLKIKTASGRKKAFSTCASHLAVVLIFFGSIIFMYVRLKKSYSLTLDRTLAIVYSVLTPMVNPIIYSLRNKEIIKAIKRTIFQKGDKASLAHL

SEQ ID NO: 147 - DNA, 975 bp, Homo sapiens
  CDS (1)..(972)
atgaatgagacaaatcattctcgggtgacagaatttgtgttgctgggactgtctagttcaagggagctccaacctttcttgtttcttacattttcactactttatctagcaattctgttgggcaactttctcatcatcctcactgtgacctcagattcccgccttcacacccccatgtactttctgcttgcaaacctgtcatttatagacgtatgtgttgcctcttttgctacccctaaaatgattgcagactttctggttgagcgcaagactatttcttttgatgcctgcctggcccagattttctttgttcatctcttcactggcagtgaaatggtgctcctagtttccatggcctatgaccgttatgttgctatatgcaaacctctccactacatgacagtcatgagccgtcgtgtatgtgttgtgctcgtcctcatttcatggtttgtgggcttcatccatactaccagccagttggcattcactgttaatctgccattttgtggtcctaataaggtagacagttttttctgtgaccttcctctagtgaccaagttagcctgcatagacacttatgttgtcagcttactaatagttgcagatagtggctttctttctctgagttcctttctcctcttggttgtctcctacactgtaatacttgttacagttaggaatcgctcctctgcaagcatggcgaaggcccgctccacattgactgctcacatcactgtggtcactttattctttggaccatgcattttcatctatgtgtggcccttcagcagttactcagttgacaaagtccttgctgtattctacaccatcttcacgcttattttaaaccctgtaatctacacgctaagaaacaaagaagtgaaggcagctatgtcaaaactgaagagtcggtatctgaagcctagtcaggtttctgtagtcataagaaatgttcttttcctagaaacaaagtaa

SEQ ID NO: 148 - protein, 324 aa, Homo sapiens
MNETNHSRVTEFVLLGLSSSRELQPFLFLTFSLLYLAILLGNFLIILTVTSDSRLHTPMYFLLANLSFIDVCVASFATPKMIADFLVERKTISFDACLAQIFFVHLFTGSEMVLLVSMAYDRYVAICKPLHYMTVMSRRVCVVLVLISWFVGFIHTTSQLAFTVNLPFCGPNKVDSFFCDLPLVTKLACIDTYVVSLLIVADSGFLSLSSFLLLVVSYTVILVTVRNRSSASMAKARSTLTAHITVVTLFFGPCIFIYVWPFSSYSVDKVLAVFYTIFTLILNPVIYTLRNKEVKAAMSKLKSRYLKPSQVSVVIRNVLFLETK

SEQ ID NO: 149 - DNA, 927 bp, Homo sapiens
  CDS (1)..(924)
atggccatggacaatgtcacagcagtgtttcagtttctccttattggcatttctaactatcctcaatggagagacacgtttttcacattagtgctgataatttacctcagcacattgttggggaatggatttatgatctttcttattcactttgaccccaacctccacactccaatctacttcttccttagtaacctgtctttcttagacctttgttatggaacagcttccatgccccaggctttggtgcattgtttctctacccatccctacctctcttatccccgatgtttggctcaaacgagtgtctccttggctttggccacagcagagtgcctcctactggctgccatggcctatgaccgtgtggttgctatcagcaatcccctgcgttattcagtggttatgaatggcccagtgtgtgtctgcttggttgctacctcatgggggacatcacttgtgctcactgccatgctcatcctatccctgaggcttcacttctgtggggctaatgtcatcaaccattttgcctgtgagattctctccctcattaagctgacctgttctgataccagcctcaatgaatttatgatcctcatcaccagtatcttcaccctgctgctaccatttgggtttgttctcctctcctacatacgaattgctatggctatcataaggattcgctcactccagggcaggctcaaggcctttaccacatgtggctctcacctgaccgtggtgacaatcttctatgggtcagccatctccatgtatatgaaaactcagtccaagtcctcccctgaccaggacaagtttatctcagtgttttatggagctttgacacccatgttgaaccccctgatatatagcctgagaaaaaaagatgttaaacgggcaataaggaaagttatgttgaaaaggacatga

SEQ ID NO: 150 - protein, 308 aa, Homo sapiens [sequence omitted]

SEQ ID NO: 151 - DNA, 948 bp, Homo sapiens
  CDS (1)..(945)
atgagacagaataacaatattacagaatttgtcctcctgggcttttctcaggatcctggtgtgcaaaaagcattatttgtcatgtttttactcacatacttggtgacagtggtggggaacctgctcattgtggtggatattattgccagcccttccttgggttccccaatgtatttcttccttgcctgcctgtcatttatagatgctgcatattccactaccatttctcccaagttaattgtaggcttattctgtgataaaaagactatttccttccaaggttgcatgggccagctatttatagaccatttctttggtggggctgaggtcttccttctggtggtgatggcctgtgatcgctatgtggccatctgtaagccactgcactatttgaccatcatgaatcgacaggtttgcttccttctgttggtggtggccatgattggaggttttgtacattctgcgtttcaaattgttgtgtacagtctccctatctgtggtcccaatgtcattgttcatttcagttgtgacatgcacccattactggaactggcatgcactgacacctactttataggcctcactgttgttgtcaatagtggagcaatctgtatggtcattttcaaccttctgttaatctcctatggagtcatcctaagctcccttaaaacttacagtcaggaaaagaggggtaaagccttgtctacctgcagctccggcagtaccgttgttgtcctcttttttgtaccctgtattttcatatatgttagacctgtttcaaactttcctactgataagttcatgactgtgttttataccattatcacacacatgctgagtcctttaatatatacgttgagaaattcagagatgagaaatgctatagaaaaactcttgggtaaaaagttaactatatttattataggaggagtgtccgtcctcatgtag

SEQ ID NO: 152 - protein, 315 aa, Homo sapiens
MRQNNNITEFVLLGFSQDPGVQKALFVMFLLTYLVTVVGNLLIVVDIIASPSLGSPMYFFLACLSFIDAAYSTTISPKLIVGLFCDKKTISFQGCMGQLFIDHFFGGAEVFLLVVMACDRYVAICKPLHYLTIMNRQVCFLLLVVAMIGGFVHSAFQIVVYSLPICGPNVIVHFSCDMHPLLELACTDTYFIGLTVVVNSGAICMVIFNLLLISYGVILSSLKTYSQEKRGKALSTCSSGSTVVVLFFVPCIFIYVRPVSNFPTDKFMTVFYTIITHMLSPLIYTLRNSEMRNAIEKLLGKKLTIFIIGGVSVLM

SEQ ID NO: 153 - DNA, 1044 bp, Homo sapiens
  CDS (1)..(1041)
atgggtaactggactgcagcggtgactgagtttgttctgctggggttttccctgagcagggaggtggagctgctgctcctggtgctcctgctgcccacgttcctgctgactcttctggggaacctgctcatcatctccactgtgctgtcctgctcccgcctccacacccccatgtacttcttcttgtgcaacctctctatcctggacatcctcttcacctcagtcatctctccaaaagtgttggccaacttaggatctagggataaaaccatctcctttgccggatgtatcacccagtgctatttctactttttcttgggcacagttgagttcctcctgctgacggtcatgtcctatgaccgttatgccaccatctgctgccccctgcggtacaccaccatcatgagaccttctgtctgcattgggaccgttgtattctcttgggtgggaggcttcctgtctgtgctctttccaaccatcctcatctcccagctgcccttctgtggctccaatatcattaaccacttcttctgtgacagtggacccttgctggccctggcctgtgcagacaccactgccatcgagctgatggattttatgctttcttccatggtcatcctctgctgcatagtcctcgtggcctattcctatacgtacatcatcttgaccatagtgcgcattccttctgcaagtggaaggaagaaggcctttaatacctgtgcttcccacctgaccatagtcatcattcctagtggcatcactgtgtttatctatgtgactccctcccagaaagaatatctggagatcaacaagatccctttggttctgagcagtgtggtgactccattcctcaacccctttatatatactctgaggaatgacacagtgcagggagtcctcagggatgtgtgggtcagggttcgaggagtttttgaaaagaggatgagggcagtgctgagaagcagattatcctccaacaaagaccaccaaggaagggcttgctcttctccaccatgtgtctattctgtaaagctccagtgttag

SEQ ID NO: 154 - protein, 347 aa, Homo sapiens
MGNWTAAVTEFVLLGFSLSREVELLLLVLLLPTFLLTLLGNLLIISTVLSCSRLHTPMYFFLCNLSILDILFTSVISPKVLANLGSRDKTISFAGCITQCYFYFFLGTVEFLLLTVMSYDRYATICCPLRYTTIMRPSVCIGTVVFSWVGGFLSVLFPTILISQLPFCGSNIINHFFCDSGPLLALACADTTAIELMDFMLSSMVILCCIVLVAYSYTYIILTIVRIPSASGRKKAFNTCASHLTIVIIPSGITVFIYVTPSQKEYLEINKIPLVLSSVVTPFLNPFIYTLRNDTVQGVLRDVWVRVRGVFEKRMRAVLRSRLSSNKDHQGRACSSPPCVYSVKLQC

SEQ ID NO: 155 - DNA, 942 bp, Homo sapiens
  CDS (1)..(939)
atggctggggaaaaccatactacactgcctgaattcctccttctgggattctctgacctcaaggccctgcagggccccctgttctgggtggtgcttctggtctacctggtcaccttgctgggtaactccctgatcatcctcctcacacaggtcagccctgccctgcactcccccatgtacttcttcctgcgccaactctcagtggtggagctcttctacaccactgacatcgtgcccaggaccctggccaatctgggctccccgcatccccaggccatctctttccagggctgtgcagcccagatgtacgtcttcattgtcctgggcatctcggagtgctgcctgctcacggccatggcctatgaccgatatgttgccatctgccagcccctacgctattccaccctcttgagcccacgggcctgcttggccatggtggggtcctcctggctcacaggcatcatcacggccaccacccatgcctccctcatcttctctctaccttttcgcagccacccgatcatcccgcactttctctgtgacatcctgccagtactgaggctggcaagtgctgggaagcacaggagcgagatctccgtgatgacagccaccatagtcttcattatgatccccttctctctgattgtcacctcttacatccgcatcctgggtgccatcctagcaatggcctccacccagagccgccgcaaggtcttctccacctgctcctcccatctgctcgtggtctctctcttctttggaacagccagcatcacctacatccggccgcaggcaggctcctctgttaccacagaccgcgtcctcagtctcttctacacagtcatcacacccatgctcaaccccatcatctacacccttcggaacaaggacgtgaggagggccctgcgacacttggtgaagaggcagcgcccctcaccctga

SEQ ID NO: 156 - protein, 313 aa, Homo sapiens
MAGENHTTLPEFLLLGFSDLKALQGPLFWVVLLVYLVTLLGNSLIILLTQVSPALHSPMYFFLRQLSVVELFYTTDIVPRTLANLGSPHPQAISFQGCAAQMYVFIVLGISECCLLTAMAYDRYVAICQPLRYSTLLSPRACLAMVGSSWLTGIITATTHASLIFSLPFRSHPIIPHFLCDILPVLRLASAGKHRSEISVMTATIVFIMIPFSLIVTSYIRILGAILAMASTQSRRKVFSTCSSHLLVVSLFFGTASITYIRPQAGSSVTTDRVLSLFYTVITPMLNPIIYTLRNKDVRRALRHLVKRQRPSP

SEQ ID NO: 157 - DNA, 990 bp, Homo sapiens
  CDS (1)..(987)
atgactttggtttcttttttctctttcctctccaagccattgataatgctccttagcaattcaagctggaggctatcccagccttcttttctcctggtagggattccaggtttagaggaaagccagcactggattgcactgcccctgggcatcctttacctccttgctttagtgggcaatgttaccattctcttcatcatctggatggacccatccttgcaccaatctatgtacctcttcctgtccatgctagctgccatcgacctggttctggcctcctccactgcacccaaagcccttgcagtgctcctggttcatgcccacgagattgggtacatcgtctgcctgatccagatgttcttcatccatgcattctcctccatggagtcaggggtacttgtggccatggctctggatcgctatgtagccatttgtcaccccttgcaccattccacaatcctgcatccaggggtcatagggcgcatcggaatggtggtgctggtgaggggattactactccttatccccttccccattttgttgggaacacttatcttctgccaagccaccatcataggccatgcctattgtgaacatatggctgttgtgaaacttgcctgctcagaaaccacagtcaatcgagcttatgggctgactatggccttgcttgtgattgggctggatgttctggccattggtgtttcctatgcccacatcctccaggcagtgctgaaggtaccagggagtgaggcccgacttaaggcgtttagcacatgtggctctcatatttgtgtcatcctggtcttctatgtccctggaattttctccttcctcactcaccgctttggtcatcatgtaccccatcatgtccatgttcttctggccacacggtatctcctcatgccacctgcgctcaatcctcttgtctatggagtgaagactcagcagatccgccagcgagtgctcagagtgtttacacaaaaggattga

SEQ ID NO: 158 - protein, 329 aa, Homo sapiens
MTLVSFFSFLSKPLIMLLSNSSWRLSQPSFLLVGIPGLEESQHWIALPLGILYLLALVGNVTILFIIWMDPSLHQSMYLFLSMLAAIDLVLASSTAPKALAVLLVHAHEIGYIVCLIQMFFIHAFSSMESGVLVAMALDRYVAICHPLHHSTILHPGVIGRIGMVVLVRGLLLLIPFPILLGTLIFCQATIIGHAYCEHMAVVKLACSETTVNRAYGLTMALLVIGLDVLAIGVSYAHILQAVLKVPGSEARLKAFSTCGSHICVILVFYVPGIFSFLTHRFGHHVPHHVHVLLATRYLLMPPALNPLVYGVKTQQIRQRVLRVFTQKD

SEQ ID NO: 159 - DNA, 960 bp, Homo sapiens
  CDS (1)..(957)
atgaatttggattcttttttctctttcctcctcaagtcattgataatggcacttagcaattccagctggaggctaccccagccttcttttttcctggtaggaattccgggtttagaggaaagccagcactggatcgcactgcccctgggcatcctttacctccttgctctagtgggcaatgttaccattctcttcatcatctggatggacccatccttgcaccaatctatgtacctcttcctgtccatgctagctgccatcgacctggttgtggcctcctccactgcacccaaagcccttgcagtgctcctggttcgtgcccaagagattggttacactgtctgcctgatccagatgttcttcacccatgcattctcctccatggagtcaggggtacttgtggccatggctctggatcgctatgtagccatttgtcaccccttgcaccattccacaatcctgcatccaggggtcatagggcacatcggaatggtggtgctggtgcggggattactactcctcatccccttcctcattctgttgcgaaaacttatcttctgccaagccaccatcataggccatgcctattgtgaacatatggctgttgtgaaacttgcctgctcagaaaccacagtcaatcgagcttatgggctgactgtggccttgcttgtggttgggctggatgtcctggccattggtgtttcctatgcccacattctccaggcagtgctgaaggtaccaggaaatgaggcccgacttaaggcctttagcacatgtggctctcatgtttgtgtcatcctggtcttctatatcccgggaatgttctccttcctcactcaccgctttggtcatcatgtaccccatcacgtccatgttcttctggccatactgtatcgccttgtgccacctgcactcaatcctcttgtctatagggtgaagacccagaagatccaccagtga

SEQ ID NO: 160 - protein, 319 aa, Homo sapiens
MNLDSFFSFLLKSLIMALSNSSWRLPQPSFFLVGIPGLEESQHWIALPLGILYLLALVGNVTILFIIWMDPSLHQSMYLFLSMLAAIDLVVASSTAPKALAVLLVRAQEIGYTVCLIQMFFTHAFSSMESGVLVAMALDRYVAICHPLHHSTILHPGVIGHIGMVVLVRGLLLLIPFLILLRKLIFCQATIIGHAYCEHMAVVKLACSETTVNRAYGLTVALLVVGLDVLAIGVSYAHILQAVLKVPGNEARLKAFSTCGSHVCVILVFYIPGMFSFLTHRFGHHVPHHVHVLLAILYRLVPPALNPLVYRVKTQKIHQ

SEQ ID NO: 161 - DNA, 945 bp, Homo sapiens
  CDS (1)..(942)
atgtcagcctccaatatcaccttaacacatccaactgccttcttgttggtggggattccaggcctggaacacctgcacatctggatctccatccctttctgcttagcatatacactggccctgcttggaaactgcactctccttctcatcatccaggctgatgcagccctccatgaacccatgtacctctttctggccatgttggcagccatcgacctggtcctttcctcctcagcactgcccaaaatgcttgccatattctggttcagggatcgggagataaacttctttgcctgtctggcccagatgttcttccttcactccttctccatcatggagtcagcagtgctgctggccatggcctttgaccgctatgtggctatctgcaagccactgcactacaccaaggtcctgactgggtccctcatcaccaagattggcatggctgctgtggcccgggctgtgacactaatgactccactccccttcctgctgagatgtttccactactgccgaggcccagtgatcgctcactgctactgtgaacacatggctgtggtgaggctggcgtgtggggacactagcttcaacaatatctatggcatcgctgtggccatgtttattgtggtgttggacctgctccttgttatcctgtcttatatctttattcttcaggcagttctactgcttgcctctcaggaggcccactacaaggcatttgggacatgtgtctctcatataggtgccatcttagccttctacacaactgtggtcatctcttcagtcatgcaccgtgtagcccgccatgctgcccctcatgtccacatcctccttgccaatttctatctgctcttcccacccatggtcaatcccataatctatggtgtcaagaccaagcaaatccgtgagagcatcttgggagtattcccaagaaaggatatgtag

SEQ ID NO: 162 - protein, 314 aa, Homo sapiens
MSASNITLTHPTAFLLVGIPGLEHLHIWISIPFCLAYTLALLGNCTLLLIIQADAALHEPMYLFLAMLAAIDLVLSSSALPKMLAIFWFRDREINFFACLAQMFFLHSFSIMESAVLLAMAFDRYVAICKPLHYTKVLTGSLITKIGMAAVARAVTLMTPLPFLLRCFHYCRGPVIAHCYCEHMAVVRLACGDTSFNNIYGIAVAMFIVVLDLLLVILSYIFILQAVLLLASQEAHYKAFGTCVSHIGAILAFYTTVVISSVMHRVARHAAPHVHILLANFYLLFPPMVNPIIYGVKTKQIRESILGVFPRKDM

SEQ ID NO: 163 - DNA, 945 bp, Homo sapiens
  CDS (1)..(942)
atgcttccctctaatatcacctcaacacatccagctgtctttttgttggtaggaattcctggtttggaacacctgcatgcctggatctccatccccttctgctttgcttatactctggccctgctaggcaactgtacccttctcttcattatccgggctgatgcagccctccatgaacccatgtacctctttctggccatgttggcaaccattgacttggttctttcttctacaacgctgcccaaaatgcttgccatattctggttcagggatcaggagatcaacttctttgcctgtctggtccagatgttcttccttcactccttctccatcatggagtcagcagtgctgctggccatggcctttgaccgctatgtggccatctgcaagccattgcactacacgacggtcctgactgggtccctcatcaccaagattggcatggctgctgtggcctgggctgtgacactaatgactccactccccttcctgctcagacgcttccactactgccgaggcccagtgattgcccattgctactgtgaacacatggctgtggtaaggctggcgtgtggggacactagcttcaacaatatctatggcattgctgtggccatgtttattgtggtgttggacctgctctttgttatcctgtcttatgtcttcatccttcaggcagttctccagcttgcctctcaggaggcccgctacaaggcatttgggacatgtgtgtctcacataggtgccatcctgtccacctacactccagtagtcatctcttcagtcatgcaccgtgtagcccgccatgctgcccctcgtgtccacatactccttgctattttctatctccttttcccacccatggtcaatcctatcatatatggagtcaagaccaagcagattcgtgagtatgtgctcagtctattccagagaaagaacatgtag

SEQ ID NO: 164 - protein, 314 aa, Homo sapiens
MLPSNITSTHPAVFLLVGIPGLEHLHAWISIPFCFAYTLALLGNCTLLFIIRADAALHEPMYLFLAMLATIDLVLSSTTLPKMLAIFWFRDQEINFFACLVQMFFLHSFSIMESAVLLAMAFDRYVAICKPLHYTTVLTGSLITKIGMAAVAWAVTLMTPLPFLLRRFHYCRGPVIAHCYCEHMAVVRLACGDTSFNNIYGIAVAMFIVVLDLLFVILSYVFILQAVLQLASQEARYKAFGTCVSHIGAILSTYTPVVISSVMHRVARHAAPRVHILLAIFYLLFPPMVNPIIYGVKTKQIREYVLSLFQRKNM

SEQ ID NO: 165 - DNA, 984 bp, Homo sapiens
  CDS (1)..(981)
atgcttcataccaacaatacacagtttcacccttccaccttcctcgtagtgggggtcccagggctggaagatgtgcatgtatggattggcttccccttctttgcggtgtatctaacagcccttctagggaacatcattatcctgtttgtgatacagactgaacagagcctccaccaacccatgttttacttcctagccatgttggccggcactgatctgggcttgtctacagcaaccatccccaagatgctgggaattttctggtttaatcttggagagattgcatttggtgcctgcatcacacagatgtataccattcatatatgcactggcctggagtctgtggtactgacagtcacgggcatagatcgctatattgccatctgcaaccccctgagatatagcatgatccttaccaacaaggtaatagccattctgggcatagtcatcattgtcaggactttggtatttgtgactccattcacatttctcaccctgagattgcctttctgtggtgtccggattatccctcatacctattgtgaacacatgggcttggcaaagttagcttgtgccagtattaatgttatatatggattgattgccttctcagtgggatacattgacatttctgtgattggattttcctatgtccagatcctccgagctgtcttccatctcccagcctgggatgcccggcttaaggcactcagcacatgtggctctcacgtctgtgttatgttggctttctacctgccagccctcttttccttcatgacacaccgctttggccacaacatccctcattacatccacattcttctggccaatctgtatgtggtttttccccctgctcttaactctgttatctatggggtcaaaacaaaacagatacgagagcaggtacttaggatactcaaccctaaaagcttttggcattttgaccccaagaggatcttccacaacaattcagttagacaataa

SEQ ID NO: 166 - protein, 327 aa, Homo sapiens
MLHTNNTQFHPSTFLVVGVPGLEDVHVWIGFPFFAVYLTALLGNIIILFVIQTEQSLHQPMFYFLAMLAGTDLGLSTATIPKMLGIFWFNLGEIAFGACITQMYTIHICTGLESVVLTVTGIDRYIAICNPLRYSMILTNKVIAILGIVIIVRTLVFVTPFTFLTLRLPFCGVRIIPHTYCEHMGLAKLACASINVIYGLIAFSVGYIDISVIGFSYVQILRAVFHLPAWDARLKALSTCGSHVCVMLAFYLPALFSFMTHRFGHNIPHYIHILLANLYVVFPPALNSVIYGVKTKQIREQVLRILNPKSFWHFDPKRIFHNNSVRQ

SEQ ID NO: 167 - DNA, 954 bp, Homo sapiens
  CDS (1)..(951)
atggcaggaagaatgtctacgtctaatcacacccagttccatccttcttcattcctactgctgggtatcccagggctagaagatgtgcacatttggattggagtcccttttttctttgtgtatcttgttgcactcctgggaaacactgctctcttgtttgtgatccagactgagcagagtctccatgagcctatgtactacttcctggccatgttggattccattgacctgggcttgtctacagccaccatccccaaaatgttgggcatcttctggttcaataccaaagaaatatcttttggaggctgcctttctcacatgttcttcatccatttcttcactgctatggagagcattgtgttggtggccatggcctttgaccgctacattgccatttgcaaacctcttcggtacaccatgatcctcaccagcaaaatcatcagcctcattgcaggcattgctgtcctgaggagcctgtacatggttgttccactggtgtttctccttctgaggctgcccttctgtgggcatcgtatcatccctcatacttattgtgagcacatgggcattgcccgtctggcctgtgccagcatcaaagtcaacattaggtttggccttggcaacatatctctcttgttactggatgttatccttattattctctcctatgtcaggatcctgtatgctgtcttctgcctgccctcctgggaagctcgactcaaagctctcaacacctgtggttctcatattggtgttatcttagccttttttacaccagcatttttttcattcttgacacatcgttttggccataatatcccacagtatatacatattatattagccaacctgtatgtggttgtcccaccagccctcaatcctgtaatctatggagtcaggacaaagcagattcgagagagagtgctgaggatttttctcaagaccaatcactaa

SEQ ID NO: 168 - protein, 317 aa, Homo sapiens
MAGRMSTSNHTQFHPSSFLLLGIPGLEDVHIWIGVPFFFVYLVALLGNTALLFVIQTEQSLHEPMYYFLAMLDSIDLGLSTATIPKMLGIFWFNTKEISFGGCLSHMFFIHFFTAMESIVLVAMAFDRYIAICKPLRYTMILTSKIISLIAGIAVLRSLYMVVPLVFLLLRLPFCGHRIIPHTYCEHMGIARLACASIKVNIRFGLGNISLLLLDVILIILSYVRILYAVFCLPSWEARLKALNTCGSHIGVILAFFTPAFFSFLTHRFGHNIPQYIHIILANLYVVVPPALNPVIYGVRTKQIRERVLRIFLKTNH

SEQ ID NO: 169 - DNA, 972 bp, Homo sapiens
  CDS (1)..(969)
atgagtcacaccaatgttaccatcttccatcctgcagtttttgtccttcctggcatccctgggttggaggcttatcacatttggctgtcaatacctctttgcctcatttacatcactgcagtcctgggaaacagcatcctgatagtggttattgtcatggaacgtaaccttcatgtgcccatgtatttcttcctctcaatgctggccgtcatggacatcctgctgtctaccaccactgtgcccaaggccctagccatcttttggcttcaagcacataacattgcttttgatgcctgtgtcacccaaggcttctttgtccatatgatgtttgtgggggagtcagctatcctgttagccatggcctttgatcgctttgtggccatttgtgccccactgagatatacaacagtgctaacatggcctgttgtggggaggattgctctggccgtcatcacccgaagcttctgcatcatcttcccagtcatattcttgctgaagcggctgcccttctgcctaaccaacattgttcctcactcctactgtgagcatattggagtggctcgtttagcctgtgctgacatcactgttaacatttggtatggcttctcagtgcccattgtcatggtcatcttggatgttatcctcatcgctgtgtcttactcactgatcctccgagcagtgtttcgtttgccctcccaggatgctcggcacaaggccctcagcacttgtggctcccacctctgtgtcatccttatgttttatgttccatccttctttaccttattgacccatcattttgggcgtaatattcctcaacatgtccatatcttgctggccaatctttatgtggcagtgccaccaatgctgaaccccattgtctatggtgtgaagactaagcagatacgtgagggtgtagcccaccggttctttgacatcaagacttggtgctgtacctcccctctgggctcatga

SEQ ID NO: 170 - protein, 323 aa, Homo sapiens
MSHTNVTIFHPAVFVLPGIPGLEAYHIWLSIPLCLIYITAVLGNSILIVVIVMERNLHVPMYFFLSMLAVMDILLSTTTVPKALAIFWLQAHNIAFDACVTQGFFVHMMFVGESAILLAMAFDRFVAICAPLRYTTVLTWPVVGRIALAVITRSFCIIFPVIFLLKRLPFCLTNIVPHSYCEHIGVARLACADITVNIWYGFSVPIVMVILDVILIAVSYSLILRAVFRLPSQDARHKALSTCGSHLCVILMFYVPSFFTLLTHHFGRNIPQHVHILLANLYVAVPPMLNPIVYGVKTKQIREGVAHRFFDIKTWCCTSPLGS

SEQ ID NO: 171 - DNA, 963 bp, Homo sapiens
  CDS (1)..(963)
atggcagaaactctacaactcaattccaccttcctacacccaaacttcttcatactgactggctttccagggctaggaagtgcccagacttggctgacactggtctttgggcccatttatctgctggccctgctgggcaatggagcactgccggcagtggtgtggatagactccacactgcaccagcccatgtttctactgttggccatcctggcagccacagacctgggcttagccacatctatagccccagggttgctggctgtgctgtggcttgggccccgatctgtgccatatgctgtgtgcctggtccagatgttctttgtacatgcactgactgccatggaatcaggtgtgcttttggccatggcctgtgatcgtgctgcggcaatagggcgtccactgcactaccctgtcctggtcaccaaagcctgtgtgggttatgcagccttggccctggcactgaaagctgtggctattgttgtacctttcccactgctggtggcaaagtttgagcacttccaagccaagaccataggccatacctattgtgcacacatggcagtggtagaactggtggtgggtaacacacaggccaccaacttatatggtctggcactttcactggccatctcaggtatggatattctgggtatcactggctcctatggactcattgcccatgctgtgctgcagctacctacccgggaggcccatgccaaggcctttggtacatgtagttctcacatctgtgtcattctggccttctacatacctggtctcttctcctacctcacacaccgctttggtcatcacactgtcccaaagcctgtgcacatccttctctccaacatctacttgctgctgccacctgccctcaaccccctcatctatggggcccgcaccaagcagatcagagaccgactcctggaaaccttcacattcagaaaaagcccgttgtaa

SEQ ID NO: 172 - protein, 320 aa, Homo sapiens
MAETLQLNSTFLHPNFFILTGFPGLGSAQTWLTLVFGPIYLLALLGNGALPAVVWIDSTLHQPMFLLLAILAATDLGLATSIAPGLLAVLWLGPRSVPYAVCLVQMFFVHALTAMESGVLLAMACDRAAAIGRPLHYPVLVTKACVGYAALALALKAVAIVVPFPLLVAKFEHFQAKTIGHTYCAHMAVVELVVGNTQATNLYGLALSLAISGMDILGITGSYGLIAHAVLQLPTREAHAKAFGTCSSHICVILAFYIPGLFSYLTHRFGHHTVPKPVHILLSNIYLLLPPALNPLIYGARTKQIRDRLLETFTFRKSPL

SEQ ID NO: 173 - DNA, 960 bp, Homo sapiens
  CDS (1)..(957)
atggatacctccaccagtgttacctatgactccagcctccagatttcccagttcatcctgatgggattaccaggcattcatgagtggcagcactggctctccctgcccctgactctgctctacctcttagctcttggtgccaacctcctcatcataatcaccattcaacatgagaccgtgctacatgaacccatgtaccatttgctgggcatattagcagtggtggacattggcctggccaccaccatcatgcccaagatcctggccatcttctggtttgatgccaaggccattagcctccccatgtgttttgctcagatctatgccatccactgcttcttctgcatagagtcaggcatctttctctgcatggcagtagacagatacatagccatctgtcgccctcttcagtacccctccatagtcactaaagcttttgtcttcaaagccacagggttcatcatgctcaggaatggcctgttgaccatcccagtgcctatactggctgcccagagacactactgttccaggaatgaaatcgagcactgcctctgctctaacttgggggttatcagcctggcttgtgatgacatcactgtgaacaaattttaccaactgatgctagcatgggtcttggttgggagtgatatggctctggtattttcttcctatgctgtaatccttcactctgtgctgaggctgaactcagcagaagcaatgtccaaggctctgagcacttgtagctcccacctcatcctcatcctcttccacacaggtatcattgtgctgtctgtcacacaccttgcagagaaaaagattccccttattcctgtgttccttaatgtgctgcacaatgtcatcccccctgcactcaaccccctggcctgtgcactcaggatgcacaaactcagactgggctttcagagactgcttggactgggtcaggacgtgtccaagtaa

SEQ ID NO: 174 - protein, 319 aa, Homo sapiens
MDTSTSVTYDSSLQISQFILMGLPGIHEWQHWLSLPLTLLYLLALGANLLIIITIQHETVLHEPMYHLLGILAVVDIGLATTIMPKILAIFWFDAKAISLPMCFAQIYAIHCFFCIESGIFLCMAVDRYIAICRPLQYPSIVTKAFVFKATGFIMLRNGLLTIPVPILAAQRHYCSRNEIEHCLCSNLGVISLACDDITVNKFYQLMLAWVLVGSDMALVFSSYAVILHSVLRLNSAEAMSKALSTCSSHLILILFHTGIIVLSVTHLAEKKIPLIPVFLNVLHNVIPPALNPLACALRMHKLRLGFQRLLGLGQDVSK

SEQ ID NO: 175 - DNA, 963 bp, Homo sapiens
  CDS (1)..(963)
atggcagaaactctacaactcaattccaccttcctacacccaaacttcttcatactgactggctttccagggctaggaagtgcccagacttggctgacactggtctttgggcccatttatctgctggccctgctgggcaatggagcactgccggcagtggtgtggatagactccacactgcaccagcccatgtttctactgttggccatcctggcagccacagacctgggcttagccacatctatagccccagggttgctggctgtgctgtggcttgggccccgatctgtgccatatgctgtgtgcctggtccagatgttctttgtacatgcactgactgccatggaatcaggtgtgcttttggccatggcctgtgatcgtgctgcggcaatagggcgtccactgcactaccctgtcctggtcaccaaagcctgtgtgggttatgcagccttggccctggcactgaaagctgtggctattgttgtacctttcccactgctggtggcaaagtttgagcacttccaagccaagaccataggccatacctattgtgcacacatggcagtggtagaactggtggtgggtaacacacaggccaccaacttatatggtctggcactttcactggccatctcaggtatggatattctgggtatcactggctcctatggactcattgcccatgctgtgctgcagctacctacccgggaggcccatgccaaggcctttggtacatgtagttctcacatctgtgtcattctggccttctacatacctggtctcttctcctacctcgcacaccgctttggtcatcacactgtcccaaagcctgtgcacatccttctctccaacatctacttgctgctgccacctgccctcaaccccctcatctatggggcccgcaccaagcagatcagagaccgactcctggaaaccttcacattcagaaaaagcccgttgtaa

SEQ ID NO: 176 - protein, 320 aa, Homo sapiens [sequence omitted]

SEQ ID NO: 177 - DNA, 1008 bp, Homo sapiens
  CDS (1)..(1005)
atggcacaggtgagggcgctgcataaaatcatggcccttttttctgctaacagcataggtgctatgaacaactctgacactcgcatagcaggctgcttcctcactggcatccctgggctggagcaactacatatctggctgtccatccccttctgcatcatgtacatcgctgccctggaaggcaatggcatcctaatttgtgtcatcctctcccaggcaatcctgcatgagcccatgtacatattcttatctatgctggccagtgctgatgtcttgctctctaccaccaccatgcctaaggccctggccaatttgtggctaggttatagccacatttcctttgatggctgcctcactcaaaagttcttcattcacttcctcttcattcactctgctgtcctgctggccatggcctttgaccgctatgtggccatctgctcccccctgcgatatgtcacaatcctcacaagcaaggtcattgggaagatcgtcactgccaccctgagccgcagcttcatcattatgtttccatccatctttctccttgagcacctgcactattgccagatcaacatcattgcacacacattttgtgagcacatgggcattgcccatctgtcctgttctgatatctccatcaatgtctggtatgggttggcagctgctcttctctccacaggcctggacatcatgcttattactgtttcctacatccacatcctccaagcagtcttccgcctcctttctcaagatgcccgctccaaggccctgagtacctgtggatcccatatctgtgtcatcctactcttctatgtccctgcccttttttctgtctttgcctacaggtttggtgggagaagcatcccatgctatgtccatattctcctggccagcctctacgttgtcattcctcctatgctcaatcccgttatttatggagtgaggactaagccaatactggaaggggctaagcagatgttttcaaatcttgccaaaggatctaaataa

SEQ ID NO: 178 - protein, 335 aa, Homo sapiens
MAQVRALHKIMALFSANSIGAMNNSDTRIAGCFLTGIPGLEQLHIWLSIPFCIMYIAALEGNGILICVILSQAILHEPMYIFLSMLASADVLLSTTTMPKALANLWLGYSHISFDGCLTQKFFIHFLFIHSAVLLAMAFDRYVAICSPLRYVTILTSKVIGKIVTATLSRSFIIMFPSIFLLEHLHYCQINIIAHTFCEHMGIAHLSCSDISINVWYGLAAALLSTGLDIMLITVSYIHILQAVFRLLSQDARSKALSTCGSHICVILLFYVPALFSVFAYRFGGRSIPCYVHILLASLYVVIPPMLNPVIYGVRTKPILEGAKQMFSNLAKGSK

SEQ ID NO: 179 - DNA, 945 bp, Homo sapiens
  CDS (1)..(945)
atgatcattttcaacctgagcagttacaatccaggacccttcattctggtagggatcccaggcctggagcaattccatgtgtggattggaattcccttctgtatcatctacattgtagctgttgtgggaaactgcatccttctctacctcattgtggtggagcatagtcttcatgaacccatgttcttctttctctccatgctggccatgactgacctcatcttgtccacagctggtgtgcctaaagcactcagtatcttttggctaggggctcgcgaaatcacattcccaggatgccttacacaaatgttcttccttcactataactttgtcctggattcagccattctgatggccatggcatttgatcactatgtagctatctgttctcccttgagatataccaccatcttgactcccaagaccatcatcaagagtgctatgggcatctcctttcgaagcttctgcatcatcctgccagatgtattcttgctgacatgcctgcctttctgcaggacacgcatcataccccacacatactgtgagcatataggtgttgcccagctcgcctgtgctgatatctccatcaacttctggtatggcttttgtgttcccatcatgacggtcatctcagatgtgattctcattgctgtttcctacgcacacatcctctgtgctgtctttggccttccctcccaagatgcctgccagaaagccctcggcacttgtggttctcatgtctgtgtcatcctcatgttttatacacctgcctttttctccatcctcgcccatcgctttggacacaatgtctctcgcaccttccacatcatgtttgccaatctctacattgttatcccacctgcactcaaccccatggtttacggagtgaagaccaagcagatcagagataaggttatacttttgttttctaagggtacaggatga

SEQ ID NO: 180 - protein, 314 aa, Homo sapiens
MIIFNLSSYNPGPFILVGIPGLEQFHVWIGIPFCIIYIVAVVGNCILLYLIVVEHSLHEPMFFFLSMLAMTDLILSTAGVPKALSIFWLGAREITFPGCLTQMFFLHYNFVLDSAILMAMAFDHYVAICSPLRYTTILTPKTIIKSAMGISFRSFCIILPDVFLLTCLPFCRTRIIPHTYCEHIGVAQLACADISINFWYGFCVPIMTVISDVILIAVSYAHILCAVFGLPSQDACQKALGTCGSHVCVILMFYTPAFFSILAHRFGHNVSRTFHIMFANLYIVIPPALNPMVYGVKTKQIRDKVILLFSKGTG

SEQ ID NO: 181 - DNA, 981 bp, Homo sapiens
  CDS (1)..(978)
atgtcagtccaatattcgctcagtcctcaattcatgctgctatccaacattactcagtttagccccatattctatctcaccagctttcctggattggaaggcatcaaacactggattttcatcccctttttctttatgtacatggttgccatctcaggcaattgtttcattctgatcattattaagaccaaccctcgtctgcacacacccatgtactatctactatccttgctggccctcactgacctggggctgtgtgtgtccacgttgcccaccactatggggatcttctggtttaactcccagagtatctactttggagcgtgtcaaatccagatgttctgcatccactctttttccttcatggagtcctcagtgctcctcatgatgtcctttgaccgctttgtggccatctgccaccctctgaggtattcggtcattatcactggccagcaagtggtcagagcaggcctaattgtcatcttccggggacctgtggccactatccctattgtcctcctcctgaaggcttttccctactgtggatctgtggtcctctcccactcattttgcctgcaccaggaagtgatacagctggcctgcacagataccaccttcaataatctgtatggactgatggtggtagttttcactgtgatgctggacctggtgctcatcgcactgtcctatggactcatcctgcacacagtagcaggcctggcctcccaagaggagcagcgccgtgcctttcagacatgcaccgctcatctctgtgctgtgctagtattctttgtgcccatgatggggctgtccctggtgcaccgttttgggaagcatgccccacctgctattcatcttcttatggccaatgtctacctttttgtgcctcccatgcttaacccaatcatatacagcattaagaccaaggagatccaccgtgccattatcaaactcctaggtcttaaaaaggccagtaaatga

SEQ ID NO: 182 - protein, 326 aa, Homo sapiens
MSVQYSLSPQFMLLSNITQFSPIFYLTSFPGLEGIKHWIFIPFFFMYMVAISGNCFILIIIKTNPRLHTPMYYLLSLLALTDLGLCVSTLPTTMGIFWFNSQSIYFGACQIQMFCIHSFSFMESSVLLMMSFDRFVAICHPLRYSVIITGQQVVRAGLIVIFRGPVATIPIVLLLKAFPYCGSVVLSHSFCLHQEVIQLACTDTTFNNLYGLMVVVFTVMLDLVLIALSYGLILHTVAGLASQEEQRRAFQTCTAHLCAVLVFFVPMMGLSLVHRFGKHAPPAIHLLMANVYLFVPPMLNPIIYSIKTKEIHRAIIKLLGLKKASK

SEQ ID NO: 183 - DNA, 975 bp, Homo sapiens
  CDS (1)..(972)
atgaatcatatgtctgcatctctcaaaatctccaatagctccaaattccaggtctctgagttcatcctgctgggattcccgggcattcacagctggcaacactggctatctctgcccctggcactactgtatctctcagcacttgctgcaaacaccctcatcctcatcatcatctggcagaacccttctttacagcagcccatgtatattttccttggcatcctctgtatggtagacatgggtctggccactactatcatccctaagatcctggccatcttctggtttgatgccaaggttattagcctccctgagtgctttgctcagatttatgccattcacttctttgtgggcatggagtctggtatcctactctgcatggcttttgatagatatgtggctatttgtcaccctcttcgctatccatcaattgtcaccagttccttaatcttaaaagctaccctgttcatggtgctgagaaatggcttatttgtcactccagtgcctgtgcttgcagcacagcgtgattattgctccaagaatgaaattgaacactgcctgtgctctaaccttggggtcacaagcctggcttgtgatgacaggaggccaaacagcatttgccagttggttctggcatggcttggaatggggagtgatctaagtcttattatactgtcatatattttgattctgtactctgtacttagactgaactcagctgaagctgcagccaaggccctgagcacttgtagttcacatctcaccctcatccttttcttttacactattgttgtagtgatttcagtgactcatctgacagagatgaaggctactttgattccagttctacttaatgtgttgcacaacatcatccccccttccctcaaccctacagtttatgcacttcagaccaaagaacttagggcagccttccaaaaggtgctgtttgcccttacaaaagaaataagatcttag

SEQ ID NO: 184 - protein, 324 aa, Homo sapiens
MNHMSASLKISNSSKFQVSEFILLGFPGIHSWQHWLSLPLALLYLSALAANTLILIIIWQNPSLQQPMYIFLGILCMVDMGLATTIIPKILAIFWFDAKVISLPECFAQIYAIHFFVGMESGILLCMAFDRYVAICHPLRYPSIVTSSLILKATLFMVLRNGLFVTPVPVLAAQRDYCSKNEIEHCLCSNLGVTSLACDDRRPNSICQLVLAWLGMGSDLSLIILSYILILYSVLRLNSAEAAAKALSTCSSHLTLILFFYTIVVVISVTHLTEMKATLIPVLLNVLHNIIPPSLNPTVYALQTKELRAAFQKVLFALTKEIRS

SEQ ID NO: 185 - DNA, 978 bp, Homo sapiens
  CDS (1)..(975)
atgttccttcccaatgacacccagtttcacccctcctccttcctgttgctggggatcccaggactagaaacacttcacatctggatcggctttcccttctgtgctgtgtacatgatcgcactcatagggaacttcactattctacttgtgatcaagactgacagcagcctacaccagcccatgttctacttcctggccatgttggccaccactgatgtgggtctctcaacagctaccatccctaagatgcttggaatcttctggatcaacctcagagggatcatctttgaagcctgcctcacccagatgttttttatccacaacttcacacttatggagtcagcagtccttgtggcaatggcttatgacagctatgtggccatctgcaatccactccaatatagcgccatcctcaccaacaaggttgtttctgtgattggtcttggtgtgtttgtgagggctttaattttcgtcattccctctatacttcttatattgcggttgcccttctgtgggaatcatgtaattccccacacctactgtgagcacatgggtcttgctcatctatcttgtgccagcatcaaaatcaatattatttatggtttatgtgccatttgtaatctggtgtttgacatcacagtcattgccctctcttatgtgcatattctttgtgctgttttccgtcttcctactcatgagccccgactcaagtccctcagcacatgtggttcacatgtgtgtgtaatccttgccttctatacaccagccctcttttcctttatgactcattgctttggccgaaatgtgccccgctatatccatatactcctagccaatctctatgttgtggtgccaccaatgctcaatcctgtcatatatggagtcagaaccaagcagatctataaatgtgtaaagaaaatattattgcaggaacaaggaatggaaaaggaagagtacctaatacatacgaggttctga

SEQ ID NO: 186 - protein, 325 aa, Homo sapiens
MFLPNDTQFHPSSFLLLGIPGLETLHIWIGFPFCAVYMIALIGNFTILLVIKTDSSLHQPMFYFLAMLATTDVGLSTATIPKMLGIFWINLRGIIFEACLTQMFFIHNFTLMESAVLVAMAYDSYVAICNPLQYSAILTNKVVSVIGLGVFVRALIFVIPSILLILRLPFCGNHVIPHTYCEHMGLAHLSCASIKINIIYGLCAICNLVFDITVIALSYVHILCAVFRLPTHEPRLKSLSTCGSHVCVILAFYTPALFSFMTHCFGRNVPRYIHILLANLYVVVPPMLNPVIYGVRTKQIYKCVKKILLQEQGMEKEEYLIHTRF

SEQ ID NO: 187 - DNA, 1029 bp, Homo sapiens
  CDS (1)..(1026)
atgactgaaacatccctgtcttctcagtgcttccctatgtcggtcctcaataataccattgctgagcctctgatcttcctcctgatgggcattccaggcctgaaagccacccagtactggatctccatccctttttgtctcctatatgttgttgccgtctctggaaatagcatgatcctgtttgtggtcctctgtgaacggagcctccataagcctatgtactatttcctctctatgctttcagccacagacctgagcttgtccctgtgtacactttctactacccttggtgtcttctggtttgaagcccgagaaatcaacctaaatgcctgcattgcccagatgttctttctacacggatttactttcatggagtctggggttctactggccatggcctttgatcgttttgtggccatctgttacccactgagatacactaccatccttaccaatgcccgaattgccaagattgggatgagcatgttgataagaaatgttgccgtcatgttgccagtcatgctctttgtcaagaggttgtccttctgcagttctatggtcctttcacattcttactgctaccatgttgatctcatccaactctcctgcacagacaataggatcaacagcatccttggtctgtttgcgcttttgtccactacagggtttgactgcccttgcatcctgctctcctatatcctgatcattcgatctgtcctcagcattgcttcctcagaagagaggcggaaagccttcaacacctgcacatcccacatcagtgctgtttccatcttctacctccctctcatcagtttgtctcttgtccatcgctatggccattcagcacctccatttgtccacatcatcatggccaatgtctttctgctaatccctcctgtgctcaaccctattatttacagtgtaaagattaagcagattcaaaaggccattatcaaggtcttaattcagaagcactccaaatctaatcatcagctatttctgattagagataaagccatttatgaataa

SEQ ID NO: 188 - protein, 342 aa, Homo sapiens
MTETSLSSQCFPMSVLNNTIAEPLIFLLMGIPGLKATQYWISIPFCLLYVVAVSGNSMILFVVLCERSLHKPMYYFLSMLSATDLSLSLCTLSTTLGVFWFEAREINLNACIAQMFFLHGFTFMESGVLLAMAFDRFVAICYPLRYTTILTNARIAKIGMSMLIRNVAVMLPVMLFVKRLSFCSSMVLSHSYCYHVDLIQLSCTDNRINSILGLFALLSTTGFDCPCILLSYILIIRSVLSIASSEERRKAFNTCTSHISAVSIFYLPLISLSLVHRYGHSAPPFVHIIMANVFLLIPPVLNPIIYSVKIKQIQKAIIKVLIQKHSKSNHQLFLIRDKAIYE

SEQ ID NO: 189 - DNA, 948 bp, Homo sapiens
  CDS (1)..(945)
atggtgctggcttcagggaacagctcttctcatcctgtgtccttcatcctgcttggaatcccaggcctggagagtttccagttgtggattgcctttccgttctgtgccacgtatgctgtggctgttgttggaaatatcactctcctccatgtaatcagaattgaccacaccctgcatgagcccatgtacctctttctggccatgctggccatcactgacctggtcctctcctcctccactcaacctaagatgttggccatattctggtttcatgctcatgagattcagtaccatgcctgcctcatccaggtgttcttcatccatgccttttcttctgtggagtctggggtgctcatggctatggccctggactgctacgtggctacctgcttcccactccgacactctagcatcctgaccccatcggtcgtgatcaaactggggaccatcgtgatgctgagagggctgctgtgggtgagccccttctgcttcatggtgtctaggatgcccttctgccaacaccaagccattccccagtcatactgtgagcacatggctgtgctgaagttggtgtgtgctgatacaagcataagtcgtgggtatgggctctttgtggccttctctgtggctggctttgatatgattgtcattggtatgtcatacgtgatgattttgagagctgtgcttcagttgccctcaggtgaagcccgcctcaaagcttttagcacacgtgcctcccatatctgtgtcatcttggctctttatatcccagcccttttttctttcctcacctaccgctttggccatgatgtgccccgagttgtacacatcctgtttgctaatctctatctactgatacctcccatgctcaaccccatcatttatggagttagaaccaaacagatcggggacagggttatccaaggatgttgtggaaacatcccctga

SEQ ID NO: 190 - protein, 315 aa, Homo sapiens
MVLASGNSSSHPVSFILLGIPGLESFQLWIAFPFCATYAVAVVGNITLLHVIRIDHTLHEPMYLFLAMLAITDLVLSSSTQPKMLAIFWFHAHEIQYHACLIQVFFIHAFSSVESGVLMAMALDCYVATCFPLRHSSILTPSVVIKLGTIVMLRGLLWVSPFCFMVSRMPFCQHQAIPQSYCEHMAVLKLVCADTSISRGYGLFVAFSVAGFDMIVIGMSYVMILRAVLQLPSGEARLKAFSTRASHICVILALYIPALFSFLTYRFGHDVPRVVHILFANLYLLIPPMLNPIIYGVRTKQIGDRVIQGCCGNIP

SEQ ID NO: 191 - DNA, 942 bp, Homo sapiens
  CDS (1)..(939)
atgtccattatcaacacatcatatgttgaaatcaccaccttcttcttggttgggatgccagggctagaatatgcacacatctggatctctatccccatctgcagcatgtatcttattgctattctaggaaattgcaccattctttttatcatcaagacagagccctccttgcatgagcccatgtactattttctttccatgttggctatgtcagacttgggtttgtctttatcatctctgcccactgtgttaagcatcttcctgttcaatgctcctgaaatttcatccaatgcctgctttgcccaggaattcttcattcatggattctcagtactggagtcctcagtcctcctgatcatgtcatttgatagattcctagccatccacaaccctctgagatacacctcaatcctgacaactgtcagagttgcccaaatagggatagtattctcctttaagagcatgctcctggttcttcccttccctttcactttaagaaacttgagatattgcaagaaaaaccaattatcccattcctactgtctccaccaggatgtcatgaagttggcctgttctgacaacagaattgatgttatctatggcttttttggagcactctgccttatggtagactttattctcattgctgtgtcttacaccctgatcctcaagactgtaccgggaattgcatccaaaaaggagcagcttaaggctctcaatacttgtgtttcacacatctgtgcagtgatcatcttctacctgcccatcatcaacctggccgttgtccaccgctttgcccggcatgtctctcccctcattaatgttctcatggcaaatgttctcctacttgtacctccactgatgaacccaattgtttattgtgtaaaaactaaacagattagagtgagagttgtagcaaaattgtgtcaacggaagatttaa

SEQ ID NO: 192 - protein, 313 aa, Homo sapiens [sequence omitted]

SEQ ID NO: 193 - DNA, 966 bp, Homo sapiens
  CDS (1)..(963)
atgacaattcttcttaatagcagcctccaaagagccactttcttcctgacgggcttccaaggtctagaaggtctccatggctggatctctattcccttctgcttcatctacctgacagttatcttggggaacctcaccattctccacgtcatttgtactgatgccactctccatggacccatgtactatttcttgggcatgctagctgtcacagacttaggcctttgcctttccacactgcccactgtgctgggcattttctggtttgataccagagagattggcatccctgcctgtttcactcagctcttcttcatccacaccttgtcttcaatggagtcatcagttctgttatccatgtccattgaccgctccgtggccgtctgcaacccactgcatgactccaccgtcctgacacctgcatgtattgtcaagatggggctaagctcagtgcttagaagtgctctcctcatcctccccttgccattcctcctgaagcgcttccaatactgccactcccatgtgctggctcatgcttattgtcttcacctggagatcatgaagctggcctgctctagcatcattgtcaatcacatctatgggctctttgttgtggcctgcaccgtgggtgtggactccctgctcatctttctctcatacgccctcatccttcgcaccgtgctcagcattgcctcccaccaggagcgactccgagccctcaacacctgtgtctctcatatctgtgctgtactgctcttctacatccccatgattggcttgtctcttgtgcatcgctttggtgaacatctgccccgcgttgtacacctcttcatgtcctatgtgtatctgctggtaccaccccttatgaaccccatcatctacagcatcaagaccaagcaaattcgccagcgcatcattaagaagtttcagtttataaagtcacttaggtgtttttggaaggattaa

SEQ ID NO: 194 - protein, 321 aa, Homo sapiens
MTILLNSSLQRATFFLTGFQGLEGLHGWISIPFCFIYLTVILGNLTILHVICTDATLHGPMYYFLGMLAVTDLGLCLSTLPTVLGIFWFDTREIGIPACFTQLFFIHTLSSMESSVLLSMSIDRSVAVCNPLHDSTVLTPACIVKMGLSSVLRSALLILPLPFLLKRFQYCHSHVLAHAYCLHLEIMKLACSSIIVNHIYGLFVVACTVGVDSLLIFLSYALILRTVLSIASHQERLRALNTCVSHICAVLLFYIPMIGLSLVHRFGEHLPRVVHLFMSYVYLLVPPLMNPIIYSIKTKQIRQRIIKKFQFIKSLRCFWKD

SEQ ID NO: 195 - DNA, 984 bp, Homo sapiens
  CDS (1)..(981)
atggcaatattcaataacaccacttcgtcttcctcaaacttcctcctcactgcattccctgggctggaatgtgctcatgtctggatctccattccagtctgctgtctctacaccattgccctcttgggaaacagtatgatctttcttgtcatcattactaagcggagactccacaaacccatgtattatttcctctccatgctggcagctgttgatctatgtctgaccattacgacccttcccactgtgcttggtgttctctggtttcatgcccgggagatcagctttaaagcttgcttcattcaaatgttctttgtgcatgctttctccttgctggagtcctcggtgctggtagccatggcctttgaccgcttcgtggctatctgtaacccactgaactatgctactatcctcacagacaggatggtcctggtgatagggctggtcatctgcattagaccagcagttttcttacttccccttcttgtagccataaacactgtgtcttttcatgggggtcacgagctttcccatccattttgctaccacccagaagtgatcaaatacacatattccaaaccttggatcagcagtttttggggactgtttcttcagctctacctgaatggcactgacgtattgtttattcttttctcctatgtcctgatcctccgtactgttctgggcattgtggcccgaaagaagcaacaaaaagctctcagcacttgtgtctgtcacatctgtgcagtcactattttctatgtgccactgatcagcctctctttggcacaccgcctcttccactccaccccaagggtgctctgtagcactttggccaatatttatctgctcttaccacctgtgctgaaccctatcatttacagcttgaagaccaagacaatccgccaggctatgttccagctgctccaatccaagggttcatggggttttaatgtgaggggtcttaggggaagatgggattga

SEQ ID NO: 196 - protein, 327 aa, Homo sapiens
MAIFNNTTSSSSNFLLTAFPGLECAHVWISIPVCCLYTIALLGNSMIFLVIITKRRLHKPMYYFLSMLAAVDLCLTITTLPTVLGVLWFHAREISFKACFIQMFFVHAFSLLESSVLVAMAFDRFVAICNPLNYATILTDRMVLVIGLVICIRPAVFLLPLLVAINTVSFHGGHELSHPFCYHPEVIKYTYSKPWISSFWGLFLQLYLNGTDVLFILFSYVLILRTVLGIVARKKQQKALSTCVCHICAVTIFYVPLISLSLAHRLFHSTPRVLCSTLANIYLLLPPVLNPIIYSLKTKTIRQAMFQLLQSKGSWGFNVRGLRGRWD

SEQ ID NO: 197 - DNA, 975 bp, Homo sapiens
  CDS (1)..(972)
atgctgggtccagcttataaccacacaatggaaacccctgcctccttcctccttgtgggtatcccaggactgcaatcttcacatctttggctggctatctcactgagtgccatgtacatcatagccctgttaggaaacaccatcatcgtgactgcaatctggatggattccactcggcatgagcccatgtattgctttctgtgtgttctggctgctgtggacattgttatggcctcctcggtggtacccaagatggtgagcatcttctgctcaggagacagctcaatcagctttagtgcttgtttcactcagatgttttttgtccacttagccacagctgtggagacggggctgctgctgaccatggcttttgaccgctatgtagccatctgcaagcctctacactacaagagaattctcacgcctcaagtgatgctgggaatgagtatggccatcaccatcagagctatcatagccataactccactgagttggatggtgagtcatctacctttctgtggctccaatgtggttgtccactcctactgtgagcacatagctttggccaggttagcatgtgctgaccccgtgcccagcagtctctacagtctgattggttcctctcttatggtgggctctgatgtggccttcattgctgcctcctatatcttaattctcaaggcagtatttggtctctcctcaaagactgctcagttgaaagcattaagcacatgtggctcccatgtgggggttatggctttgtactatctacctgggatggcatccatctatgcggcctggttggggcaggatgtagtgcccttgcacacccaagtcctgctagctgacctgtacgtgatcatcccagccaccttaaatcccatcatctatggcatgaggaccaaacaactgcgggagagaatatggagttatctgatgcatgtcctctttgaccattccaacctgggttcatga

SEQ ID NO: 198 - protein, 324 aa, Homo sapiens
MLGPAYNHTMETPASFLLVGIPGLQSSHLWLAISLSAMYIIALLGNTIIVTAIWMDSTRHEPMYCFLCVLAAVDIVMASSVVPKMVSIFCSGDSSISFSACFTQMFFVHLATAVETGLLLTMAFDRYVAICKPLHYKRILTPQVMLGMSMAITIRAIIAITPLSWMVSHLPFCGSNVVVHSYCEHIALARLACADPVPSSLYSLIGSSLMVGSDVAFIAASYILILKAVFGLSSKTAQLKALSTCGSHVGVMALYYLPGMASIYAAWLGQDVVPLHTQVLLADLYVIIPATLNPIIYGMRTKQLRERIWSYLMHVLFDHSNLGS

SEQ ID NO: 199 - DNA, 963 bp, Homo sapiens
  CDS (1)..(960)
atgagttcctgcaacttcacacatgccacctttgtgcttattggtatcccaggattagagaaagcccatttctgggttggcttccccctcctttccatgtatgtagtggcaatgtttggaaactgcatcgtggtcttcatcgtaaggacggaacgcagcctgcacgctccgatgtacctctttctctgcatgcttgcagccattgacctggccttatccacatccaccatgcctaagatccttgcccttttctggtttgattcccgagagattagctttgaggcctgtcttacccagatgttctttattcatgccctctcagccattgaatccaccatcctgctggccatggcctttgaccgttatgtggccatctgccacccactgcgccatgctgcagtgctcaacaatacagtaacagcccagattggcatcgtggctgtggtccgcggatccctcttttttttcccactgcctctgctgatcaagcggctggccttctgccactccaatgtcctctcgcactcctattgtgtccaccaggatgtaatgaagttggcctatgcagacactttgcccaatgtggtatatggtcttactgccattctgctggtcatgggcgtggacgtaatgttcatctccttgtcctattttctgataatacgaacggttctgcaactgccttccaagtcagagcgggccaaggcctttggaacctgtgtgtcacacattggtgtggtactcgccttctatgtgccacttattggcctctcagtggtacaccgctttggaaacagccttcatcccattgtgcgtgttgtcatgggtgacatctacctgctgctgcctcctgtcatcaatcccatcatctatggtgccaaaaccaaacagatcagaacacgggtgctggctatgttcaagatcagctgtgacaaggacttgcaggctgtgggaggcaagtga

SEQ ID NO: 200 - protein, 320 aa, Homo sapiens
MSSCNFTHATFVLIGIPGLEKAHFWVGFPLLSMYVVAMFGNCIVVFIVRTERSLHAPMYLFLCMLAAIDLALSTSTMPKILALFWFDSREISFEACLTQMFFIHALSAIESTILLAMAFDRYVAICHPLRHAAVLNNTVTAQIGIVAVVRGSLFFFPLPLLIKRLAFCHSNVLSHSYCVHQDVMKLAYADTLPNVVYGLTAILLVMGVDVMFISLSYFLIIRTVLQLPSKSERAKAFGTCVSHIGVVLAFYVPLIGLSVVHRFGNSLHPIVRVVMGDIYLLLPPVINPIIYGAKTKQIRTRVLAMFKISCDKDLQAVGGK

SEQ ID NO: 201 - DNA, 975 bp, Homo sapiens
  CDS (1)..(972)
atgctgggtccagcttacaaccacacaatggaaacccctgcctccttcctccttgtgggtatcccaggactgcaatcttcacatctttggctggctatctcactgagtgccatgtacatcacagccctgttaggaaacaccctcatcgtgactgcaatctggatggattccactcggcatgagcccatgtattgctttctgtgtgttctggctgctgtggacattgttatggcctcctccgtggtacccaagatggtgagcatcttctgctcgggagacagctccatcagctttagtgcttgtttcactcagatgttttttgtccacttagccacagctgtggagacggggctgctgctgaccatggcttttgaccgctatgtagccatctgcaagcctctacactacaagagaattctcacgcctcaagtgatgctgggaatgagtatggccgtcaccatcagagctgtcacattcatgactccactgagttggatgatgaatcatctacctttctgtggctccaatgtggttgtccactcctactgtaagcacatagctttggccaggttagcatgtgctgaccccgtgcccagcagtctctacagtctgattggttcctctcttatggtgggctctgatgtggccttcattgctgcctcctatatcttaattctcagggcagtatttgatctctcctcaaagactgctcagttgaaagcattaagcacatgtggctcccatgtgggggttatggctttgtactatctacctgggatggcatccatctatgcggcctggttggggcaggatatagtgcccttgcacacccaagtgctgctagctgacctgtacgtgatcatcccagccactttaaatcccatcatctatggcatgaggaccaaacaattgctggagggaatatggagttatctgatgcacttcctctttgaccactccaacctgggttcatga

SEQ ID NO: 202 - protein, 324 aa, Homo sapiens
MLGPAYNHTMETPASFLLVGIPGLQSSHLWLAISLSAMYITALLGNTLIVTAIWMDSTRHEPMYCFLCVLAAVDIVMASSVVPKMVSIFCSGDSSISFSACFTQMFFVHLATAVETGLLLTMAFDRYVAICKPLHYKRILTPQVMLGMSMAVTIRAVTFMTPLSWMMNHLPFCGSNVVVHSYCKHIALARLACADPVPSSLYSLIGSSLMVGSDVAFIAASYILILRAVFDLSSKTAQLKALSTCGSHVGVMALYYLPGMASIYAAWLGQDIVPLHTQVLLADLYVIIPATLNPIIYGMRTKQLLEGIWSYLMHFLFDHSNLGS

SEQ ID NO: 203 - DNA, 975 bp, Homo sapiens
  CDS (1)..(972)
atgcagaagccccagctcttggtccctatcatagccacttcaaatggaaatctggtccacgcagcatacttccttttggtgggtatccctggcctggggcctaccatacacttttggctggctttcccactgtgttttatgtatgccttggccaccctgggtaacctgaccattgtcctcatcattcgtgtggagaggcgactgcatgagcccatgtacctcttcctggccatgctttccactattgacctagtcctctcctctatcaccatgcccaagatggccagtcttttcctgatgggcatccaggagatcgagttcaacatttgcctggcccagatgttccttatccatgctctgtcagccgtggagtcagctgtcctgctggccatggcttttgaccgctttgtggccatttgccacccattgcgccatgcttctgtgctgacagggtgtactgtggccaagattggactatctgccctgaccagggggtttgtattcttcttcccactgcccttcatcctcaagtggttgtcctactgccaaacacatactgtcacacactccttctgtctgcaccaagatattatgaagctgtcctgtactgacaccagggtcaatgtggtttatggactcttcatcatcctctcagtcatgggtgtggactctctcttcattggcttctcatatatcctcatcctgtgggctgttttggagctgtcctctcggagggcagcactcaaggctttcaacacctgcatctcccacctctgtgctgttctggtcttctatgtacccctcattgggctctcggtggtgcataggctgggtggtcccacctccctcctccatgtggttatggctaatacctacttgctgctaccacctgtagtcaacccccttgtctatggagccaagaccaaagagatctgttcaagggtcctctgtatgttctcacaaggtggcaagtga

SEQ ID NO: 204 - protein, 324 aa, Homo sapiens
MQKPQLLVPIIATSNGNLVHAAYFLLVGIPGLGPTIHFWLAFPLCFMYALATLGNLTIVLIIRVERRLHEPMYLFLAMLSTIDLVLSSITMPKMASLFLMGIQEIEFNICLAQMFLIHALSAVESAVLLAMAFDRFVAICHPLRHASVLTGCTVAKIGLSALTRGFVFFFPLPFILKWLSYCQTHTVTHSFCLHQDIMKLSCTDTRVNVVYGLFIILSVMGVDSLFIGFSYILILWAVLELSSRRAALKAFNTCISHLCAVLVFYVPLIGLSVVHRLGGPTSLLHVVMANTYLLLPPVVNPLVYGAKTKEICSRVLCMFSQGGK

SEQ ID NO: 205 - DNA, 943 bp, Homo sapiens
  CDS (1)..(942)
atgctcacttttcataatgtctgctcagtacccagctccttctggctcactggcatcccagggctggagtccctacacgtctggctctccatcccctttggctccatgtacctggtggctgtggtggggaatgtgaccatcctggctgtggtaaagatagaacgcagcctgcaccagcccatgtactttttcttgtgcatgttggctgccattgacctggttctgtctacttccactatacccaaacttctgggaatcttctggttcggtgcttgtgacattggcctggacgcctgcttgggccaaatgttccttatccactgctttgccactgttgagtcaggcatcttccttgccatggcttttgatcgctacgtggccatctgcaacccactacgtcatagcatggtgctcacttatacagtggtgggtcgtttggggcttgtttctctcctccggggtgttctctacattggacctctgcctctgatgatccgcctgcggctgcccctttataaaacccatgttatctcccactcctactgtgagcacatggctgtagttgccttgacatgtggcgacagcagggtcaataatgtctatgggctgagcatcggctttctggtgttgatcctggactcagtggctattgctgcatcctatgtgatgattttcagggccgtgatggggttagccactcctgaggctaggcttaaaaccctggggacatgcgcttctcacctctgtgccatcctgatcttttatgttcccattgctgtttcttccctgattcaccgatttggtcagtgtgtgcctcctccagtccacactctgctggccaacttctatctcctcattcctccaatcctcaatcccattgtctatgctgttcgcaccaagcagatccgagagagccttctccaaataccaaggatagaaatga

SEQ ID NO: 206 - protein, 314 aa, Homo sapiens
MLTFHNVCSVPSSFWLTGIPGLESLHVWLSIPFGSMYLVAVVGNVTILAVVKIERSLHQPMYFFLCMLAAIDLVLSTSTIPKLLGIFWFGACDIGLDACLGQMFLIHCFATVESGIFLAMAFDRYVAICNPLRHSMVLTYTVVGRLGLVSLLRGVLYIGPLPLMIRLRLPLYKTHVISHSYCEHMAVVALTCGDSRVNNVYGLSIGFLVLILDSVAIAASYVMIFRAVMGLATPEARLKTLGTCASHLCAILIFYVPIAVSSLIHRFGQCVPPPVHTLLANFYLLIPPILNPIVYAVRTKQIRESLLQIPRIEM

SEQ ID NO: 207 - DNA, 996 bp, Homo sapiens
  CDS (1)..(993)
atgtgctggactatgccctctccatttacaggtagctctactagaaatatggagagcggaaaccaatcaacagtgactgaatttatcttcactggattccctcagcttcaggatggtagtctcctgtacttctttcctttacttttcatctatacttttattatcattgataacttattaatcttctctgctgtaaggctggacacccatctccacaaccccatgtataattttatcagtatattttcctttctggagatctggtacaccacagccaccattcccaagatgctctccaacctcatcagtgaaaagaaggccatctcaatgactggctgcatcttgcagatgtatttcttccactcacttgaaaactcagaggggatcttgctgaccaccatggccattgacagatacgttgccatctgcaaccctcttcgctatcaaatgatcatgaccccccggctctgtgctcaactctctgcaggttcctgcctcttcggtttccttatcctgcttcccgagattgtgatgatttccacactgcctttctgtgggcccaaccaaatccatcagatcttctgtgacttggtccctgtgctaagcctggcctgtacagacacgtccatgattctgattgaggatgtgattcatgctgtgaccatcatcattaccttcctaatcattgccctgtcctatgtaagaattgtcactgtgatattgaggattccctcttctgaagggaggcaaaaggctttttctacctgtgcaggccacctcatggtcttcccgatattctttggcagtgtatcactcatgtacttgcgtttcagcgacacttatccaccagttttggacacagccattgcactgatgtttactgtacttgctccattcttcaatcccatcatttatagcctgagaaacaaggacatgaacaatgcgattaaaaaactgttctgtcttcaaaaagtgttgaacaagcctggaggttaa

SEQ ID NO: 208 - protein, 331 aa, Homo sapiens
MCWTMPSPFTGSSTRNMESGNQSTVTEFIFTGFPQLQDGSLLYFFPLLFIYTFIIIDNLLIFSAVRLDTHLHNPMYNFISIFSFLEIWYTTATIPKMLSNLISEKKAISMTGCILQMYFFHSLENSEGILLTTMAIDRYVAICNPLRYQMIMTPRLCAQLSAGSCLFGFLILLPEIVMISTLPFCGPNQIHQIFCDLVPVLSLACTDTSMILIEDVIHAVTIIITFLIIALSYVRIVTVILRIPSSEGRQKAFSTCAGHLMVFPIFFGSVSLMYLRFSDTYPPVLDTAIALMFTVLAPFFNPIIYSLRNKDMNNAIKKLFCLQKVLNKPGG

SEQ ID NO: 209 - DNA, 945 bp, Homo sapiens
  CDS (1)..(942)
atggagacaagaaattactctgccatgactgaattctttctggtggggctttcccaatatccagagctccagctttttctgttcctgctctgcctcatcatgtacatgataatcctcctgggaaatagcctcctcattatcatcaccatcttggattctcgcctccatactcccatgtatttctttcttggaaacctctcattcttggacatctgttacacatcctcatccattcctccaatgcttattatatttatgtctgagagaaaatccatctccttcattggctgtgctctgcagatggttgtgtcccttggcttgggctccactgagtgtgtcctcctggctgtgatggcctatgaccactatgtggccatctgcaacccactgaggtactccatcatcatgaacggagtgctgtatgtgcaaatggctgcatggtcctggatcataggctgtctgacctccctattgcaaacagttctgacaatgatgttgcctttctgtgggaataatgtcattgatcatattacctgtgaaattttggcccttctaaaacttgtttgttcagatatcaccatcaatgtgcttatcatgacagtgacaaatattgtttcactggtgattcttctactgttaattttcatctcctatgtgtttattctctcttccatcctgagaattaattgtgctgagggaagaaagaaagccttctctacctgttcagcgcactcgattgtggtcatcttattctacggttcagccctttttatgtacatgaaacccaagtcaaagaacactaatacatctgatgagattattgggctgtcttatggagtggtaagcccaatgttaaatcccatcatctatagcctcaggaataaagaggtcaaagaggctgtaaagaaagtcctgagcagacatctgcatttattgaaaatgtga

SEQ ID NO: 210 - protein, 314 aa, Homo sapiens
METRNYSAMTEFFLVGLSQYPELQLFLFLLCLIMYMIILLGNSLLIIITILDSRLHTPMYFFLGNLSFLDICYTSSSIPPMLIIFMSERKSISFIGCALQMVVSLGLGSTECVLLAVMAYDHYVAICNPLRYSIIMNGVLYVQMAAWSWIIGCLTSLLQTVLTMMLPFCGNNVIDHITCEILALLKLVCSDITINVLIMTVTNIVSLVILLLLIFISYVFILSSILRINCAEGRKKAFSTCSAHSIVVILFYGSALFMYMKPKSKNTNTSDEIIGLSYGVVSPMLNPIIYSLRNKEVKEAVKKVLSRHLHLLKM

SEQ ID NO: 211 - DNA, 954 bp, Homo sapiens
  CDS (1)..(951)
atggaaggaaagaatcaaacagctccatctgaattcatcatcttggggttcgaccacctgaatgaattgcagtatttactcttcaccatcttctttctgacctacatatgcactttaggaggcaatgtttttatcattgtggtgaccatagctgattcccacctacacacacccatgtattatttcctaggaaatcttgcccttattgacatctgctacactactactaatgtcccccagatgatggtgcatcttctgtcagagaagaaaatcatttcctatggaggctgtgtgacccagctctttgcattcattttctttgttggctcagagtgtctcctcctggcagcaatggcatatgatcgatatattgctatctgtaagccgttaaggtactcatttattatgaacaaggccctgtgcagctggttagcagcctcatgctggacatgtgggtttctcaactcagtgttgcacaccgttctgaccttccacctgcccttctgtggtaacaatcagatcaattatttcttctgtgacatacctcccttgctcatcttgtcttgtggtgatacttccctcaatgaactggctttgctgtccattgggatcctcataagctggactcctttcctgtgcatcatcctttcctacctttacatcatctccaccatcctgaggatccgttcctctgaggggaggcacaaagccttttccacctgtgcctcccacctgctcattgttattctctattatggcagtgctatcttcacgtatgtgaggcccatctcatcttactctctagagaaagatagattgatctcagtgctgtatagtgttgtcacacccatgctgaatcctgtaatttatacgctaaggaataaggacatcaaagaggctgtgaaggccatagggagaaagtggcagccaccagttttctcttctgatatataa

SEQ ID NO: 212 - protein, 317 aa, Homo sapiens
MEGKNQTAPSEFIILGFDHLNELQYLLFTIFFLTYICTLGGNVFIIVVTIADSHLHTPMYYFLGNLALIDICYTTTNVPQMMVHLLSEKKIISYGGCVTQLFAFIFFVGSECLLLAAMAYDRYIAICKPLRYSFIMNKALCSWLAASCWTCGFLNSVLHTVLTFHLPFCGNNQINYFFCDIPPLLILSCGDTSLNELALLSIGILISWTPFLCIILSYLYIISTILRIRSSEGRHKAFSTCASHLLIVILYYGSAIFTYVRPISSYSLEKDRLISVLYSVVTPMLNPVIYTLRNKDIKEAVKAIGRKWQPPVFSSDI

SEQ ID NO: 213 - DNA, 975 bp, Homo sapiens
  CDS (1)..(975)
atggctgaagttaatatcatttatgtcactgtattcattctgaaaggaattaccaaccggccagagcttcaggccccgtgctttggggtgtttttagttatctatctggtcacagtgctgggcaatcttgggttgattactttaatcaagattgatactcgactccacacacctatgtactatttcctcagccacctggcctttgttgacctttgttactcctctgctattacaccgaagatgatggtgaattttgttgtggaacgcaacaccattcctttccatgcttgtgcaacccaactgggttgttttctcaccttcatgatcactgagtgtttccttctagcctccatggcctacgattgctatgtcgccatctgtagtcccctgcattattcaacactgatgtcaagaagagtctgcattcaactggtggcagttccatatatatacagcttcctggttgccctcttccacaccgttatcactttccgtctgacttactgtggcccaaacttaattaaccatttctattgtgatgacctccccttcttagctctgtcctgctcagacacacacatgaaggaaattctgatatttgcctttgctggctttgatatgatctcttcctcttccattgtcctcacctcctacatctttattattgccgctatcctaaggatccgctctactcaggggcaacacaaagccatttccacctgtggctcccatatggtgactgtcactattttctatggcacactgatctttatgtacctacagcccaaatcaaatcactccttggacacagacaagatggcttctgtattttacacagtggtgatccccatgttaaaccccctaatctatagtctaaggaacaaagaagtgaaagatgcctcaaagaaagccttggataaaggttgtgaaaacttacagatattaacatttttaaaaataagaaaactttattaa

SEQ ID NO: 214 - protein, 324 aa, Homo sapiens
MAEVNIIYVTVFILKGITNRPELQAPCFGVFLVIYLVTVLGNLGLITLIKIDTRLHTPMYYFLSHLAFVDLCYSSAITPKMMVNFVVERNTIPFHACATQLGCFLTFMITECFLLASMAYDCYVAICSPLHYSTLMSRRVCIQLVAVPYIYSFLVALFHTVITFRLTYCGPNLINHFYCDDLPFLALSCSDTHMKEILIFAFAGFDMISSSSIVLTSYIFIIAAILRIRSTQGQHKAISTCGSHMVTVTIFYGTLIFMYLQPKSNHSLDTDKMASVFYTVVIPMLNPLIYSLRNKEVKDASKKALDKGCENLQILTFLKIRKLY

SEQ ID NO: 215 - DNA, 945 bp, Homo sapiens
  CDS (1)..(942)
atggccagaaaagatatggctcacatcaattgcacccaggcgacagagtttattcttgtgggcctcacagaccatcaggagttgaagatgcccctctttgtgctattcttatccatctacctcttcacagtggtaggcaacttgggtttgatcctactcattagagcggatacaagtctcaacacaccaatgtacttctttcttagcaacctagcttttgtggatttctgttactcttctgtcattacacccaaaatgcttgggaatttcttgtacaaacaaaatgttatatcctttgatgcatgtgctactcaactgggctgctttctcaccttcatgatatcagaatccttgctactggcttccatggcctatgaccgatatgtggccatttgtaaccctctattgtatatggttgtaatgactccaggaatctgcattcaacttgtagcagttccttatagctatagcttcctaatggcactatttcacaccatcctcaccttccgcctctcctattgccactccaacattgtcaaccatttctattgtgatgacatgcctctcctcaggctaacttgctcagacactcgcttcaaacagctctggatctttgcctgtgctggtatcatgttcatttcctcccttctgattgtctttgtctcctacatgttcatcatttctgccatcctgaggatgcattcagctgagggaagacagaaggctttctcgacgtgtggctctcacatgctggcagtcaccatattctatgggaccctcatttttatgtacttacagcctagctctagccatgccctggacacagacaagatggcctctgtcttctacacagtgatcattcccatgttgaatcccttaatctatagcctccagaataaggaggtgaaagaagctctgaagaaaatcattatcaataaaaactag

SEQ ID NO: 216 - protein, 314 aa, Homo sapiens
MARKDMAHINCTQATEFILVGLTDHQELKMPLFVLFLSIYLFTVVGNLGLILLIRADTSLNTPMYFFLSNLAFVDFCYSSVITPKMLGNFLYKQNVISFDACATQLGCFLTFMISESLLLASMAYDRYVAICNPLLYMVVMTPGICIQLVAVPYSYSFLMALFHTILTFRLSYCHSNIVNHFYCDDMPLLRLTCSDTRFKQLWIFACAGIMFISSLLIVFVSYMFIISAILRMHSAEGRQKAFSTCGSHMLAVTIFYGTLIFMYLQPSSSHALDTDKMASVFYTVIIPMLNPLIYSLQNKEVKEALKKIIINKN

SEQ ID NO: 217 - DNA, 930 bp, Homo sapiens
  CDS (1)..(927)
atggagaattgtacggaagtgacaaagttcattcttctaggactaaccagtgtcccagaactacagatccccctctttatcttgttcaccttcatctacctcctcactctgtgtgggaacctggggatgatgttgctgatcctgatggactcttgtctccacacccccatgtactttttcctcagtaacctgtctctggtggactttggatactcctcagctgtcactcccaaggtcatggctgggttccttagaggagacaaggtcatctcctacaatgcatgtgctgttcagatgttcttctttgtagccttggccacggtggaaaattacttgttggcctcaatggcctatgaccgctatgcagcagtgtgcaaacccctacactacaccaccaccatgacggccagtgtaggtgcctgtctggccctaggctcatatgtctgtggcttcctaaatgcctcattccacattgggggcatattcagtctctctttctgtaaatccaatctggtacatcactttttctgtgatgttccagcagtcatggctctgtcttgctctgataaacacactagtgaggtgattctggtttttatgtcaagctttaatatcttttttgttcttctagttatctttatctcctacttgttcatattcatcaccatcttgaagatgcattcagctaagggacaccaaaaagcattgtccacctgtgcctctcacttcactgcagtctccgtcttctatgggacagtaatcttcatctacttgcagcccagctccagccactccatggacacagacaaaatggcatctgtgttctatgctatgatcatccccatgctgaaccctgtggtctacagcctgaggaacagagaagtccagaatgcattcaagaaagtgttgagaaggcaaaaatttctataa

SEQ ID NO: 218 - protein, 309 aa, Homo sapiens
MENCTEVTKFILLGLTSVPELQIPLFILFTFIYLLTLCGNLGMMLLILMDSCLHTPMYFFLSNLSLVDFGYSSAVTPKVMAGFLRGDKVISYNACAVQMFFFVALATVENYLLASMAYDRYAAVCKPLHYTTTMTASVGACLALGSYVCGFLNASFHIGGIFSLSFCKSNLVHHFFCDVPAVMALSCSDKHTSEVILVFMSSFNIFFVLLVIFISYLFIFITILKMHSAKGHQKALSTCASHFTAVSVFYGTVIFIYLQPSSSHSMDTDKMASVFYAMIIPMLNPVVYSLRNREVQNAFKKVLRRQKFL

SEQ ID NO: 219 - DNA, 930 bp, Homo sapiens
  CDS (1)..(927)
atgaaaaacagaaccatgtttggtgagtttattctactgggccttacaaatcaacctgaactccaagtgatgatattcatctttctgttcctcacctacatgctaagtatcctaggaaatctgactattatcaccctcaccttactagacccccacctccagacccccatgtatttcttcctccggaatttctccttcttagaaatttccttcacatccatttttattcccagatttctgaccagcatgacaacaggaaataaagttatcagctttgctggctgcttgactcagtatttttttgctatatttcttggagctaccgagttttacctcctggcctccatgtcttatgatcgttatgtggccatctgcaaacccttgcattacctgactattatgagcagcagagtctgcatacaactagtgttctgctcctggttggggggattcctagcaatcttaccaccaatcatcctgatgacccaggtagatttctgtgtctccaacattctgaatcactattactgtgactatgggcctctcgtggagcttgcctgctcagacacaagcctcttagaactgatggtcatcctcttggccgttgtgactctcatggttactctggtgctggtgacactttcttacacatacattatcaggactattctgaggatcccttctgcccagcaaaggacaaaggccttttccacttgttcctcccacatgattgtcatctccctctcttatggcagctgcatgtttatgtacattaatccttctgcaaaagaaggaggtgctttcaacaaaggaatagctgtactcattacttcggttactcccttactgaatcccttcatatatactttaagaaatcagcaagtgaaacaagctttcaaggactcagtcaaaaagattgtgaaactttaa

SEQ ID NO: 220 - protein, 309 aa, Homo sapiens
MKNRTMFGEFILLGLTNQPELQVMIFIFLFLTYMLSILGNLTIITLTLLDPHLQTPMYFFLRNFSFLEISFTSIFIPRFLTSMTTGNKVISFAGCLTQYFFAIFLGATEFYLLASMSYDRYVAICKPLHYLTIMSSRVCIQLVFCSWLGGFLAILPPIILMTQVDFCVSNILNHYYCDYGPLVELACSDTSLLELMVILLAVVTLMVTLVLVTLSYTYIIRTILRIPSAQQRTKAFSTCSSHMIVISLSYGSCMFMYINPSAKEGGAFNKGIAVLITSVTPLLNPFIYTLRNQQVKQAFKDSVKKIVKL

SEQ ID NO: 221 - DNA, 930 bp, Homo sapiens
  CDS (1)..(927)
atgaaaaataaaaccgtgttaactgagtttatccttctgggtctaacagatgtccctgaactccaggtggcagttttcacctttcttttccttgcgtatttactcagcatccttggaaatctgactatcctcatcctcaccttgctggactcccaccttcagactcccatgtatttctttctccggaacttctccttcttggaaatttccttcacaaacatcttcattccaagggtcctgattagcatcacaacagggaacaagagtatcagctttgctggctgcttcactcagtatttctttgccatgttccttggggctacagagttttaccttctggctgccatgtcctatgaccgctatgtggccatctgcaaacctctgcattacaccaccatcatgagcagcagaatctgcatccagctgattttctgctcttggctgggtgggctaatggctattataccaacaatcaccctgatgagtcagcaggacttttgtgcatccaacagactgaatcattacttctgtgactatgagcctcttctggaactctcatgttcagacacaagcctcatagagaaggttgtctttcttgtggcatctgtgaccctggtggtcactctggtgctagtgattctctcctatgcattcattatcaagactattctgaagctcccctctgcccaacaaaggacaaaagccttttccacatgttcttcccacatgattgtcatctccctctcttacggaagctgcatgtttatgtacattaatccctctgcaaaagaaggggatacattcaacaagggagtagctctactcattacttcagttgctcctttgttgaacccctttatttacaccctaaggaaccaacaggtaaaacaacccttcaaggatatggtcaaaaagcttctgaatctttaa

SEQ ID NO: 222 - protein, 309 aa, Homo sapiens
MKNKTVLTEFILLGLTDVPELQVAVFTFLFLAYLLSILGNLTILILTLLDSHLQTPMYFFLRNFSFLEISFTNIFIPRVLISITTGNKSISFAGCFTQYFFAMFLGATEFYLLAAMSYDRYVAICKPLHYTTIMSSRICIQLIFCSWLGGLMAIIPTITLMSQQDFCASNRLNHYFCDYEPLLELSCSDTSLIEKVVFLVASVTLVVTLVLVILSYAFIIKTILKLPSAQQRTKAFSTCSSHMIVISLSYGSCMFMYINPSAKEGDTFNKGVALLITSVAPLLNPFIYTLRNQQVKQPFKDMVKKLLNL

SEQ ID NO: 223 - DNA, 918 bp, Homo sapiens
  CDS (1)..(915)
atggaatttgtgttcctggcctatccctcctgcccagaactgcatattctgtccttccttggggtcagcctggtttatggtttgatcatcactgggaacattctcattgtggtgtccattcacacagaaacctgtctatgcacatccatgtactatttcctgggcagcctttctgggattgaaatatgctacactgcagtggtggtgccccatatcctggccaacaccctacagtcagagaagaccatcactctcctgggctgtgccacccagatggctttcttcattgcactgggcagtgctgattgcttcctcttggctgccatggcctatgaccgctatgtggccatttgccacccgttgcagtaccctctcctcatgacattgactctttgtgtccacttggttgtggcatcagtcatcagtggtctgttcctgtccttacaactggtggccttcatcttctctctgccattctgccaggctcagggcattgagcacttcttttgtgatgtgccaccagtcatgcatgttgtttgtgctcagagtcacattcatgagcagtcagtgctggtggcagccatactagccattgctgtgcctttcttcctcatcaccacctcctacaccttcatagtggctgctctgctcaagatccactcggctgctggccgccaccgggccttctccacctgctcttcccacctcactgtggtgctgctgcagtatggctgctgtgccttcatgtacctgtgccccagctccagctacaaccccaagcaagatcggttcatctcactggtgtacacattgggaaccccactgctcaacccacttatctatgccctgaggaacagtgagatgaaaggggccgtagggagagttcttaccaggaactgcctttcccagaacagctag

SEQ ID NO: 224 - protein, 305 aa, Homo sapiens
MEFVFLAYPSCPELHILSFLGVSLVYGLIITGNILIVVSIHTETCLCTSMYYFLGSLSGIEICYTAVVVPHILANTLQSEKTITLLGCATQMAFFIALGSADCFLLAAMAYDRYVAICHPLQYPLLMTLTLCVHLVVASVISGLFLSLQLVAFIFSLPFCQAQGIEHFFCDVPPVMHVVCAQSHIHEQSVLVAAILAIAVPFFLITTSYTFIVAALLKIHSAAGRHRAFSTCSSHLTVVLLQYGCCAFMYLCPSSSYNPKQDRFISLVYTLGTPLLNPLIYALRNSEMKGAVGRVLTRNCLSQNS

SEQ ID NO: 225 - DNA, 939 bp, Homo sapiens
  CDS (1)..(936)
atggaggtgaagaactgctgcatggtgacagagttcatccttttgggaatcccacacacagaggggctggagatgacactttttgtcttattcttgcccttctatgcctgcactctactgggaaatgtgtctatccttgttgctgttatgtcttctgctcgccttcacacacctatgtatttcttcctgggaaacttgtctgtgtttgacatgggtttctcctcagtgacttgtcccaaaatgctgctctaccttatggggctgagccgactcatctcctacaaagactgtgtctgccagcttttcttcttccatttcctcgggagcattgagtgcttcttgtttacggtgatggcctatgaccgcttcactgccatctgttatcctctgcgatacacagtcatcatgaacccaaggatctgtgtggccctggctgtgggcacatggctgttagggtgcattcattccagtatcttgacctccctcaccttcaccttgccatactgtggtcccaatgaagtggatcacttcttctgtgacattccagcactgttgcccttggcctgtgctgacacatccttagcccagagggtgagcttcaccaacgttggcctcatatctcttgtctgctttctgctaattcttttatcctacactagaatcacaatatctatcttaagcattcgtacaactgagggccgtcgccgtgccttctccacctgcagtgctcacctcattgccatcctctgtgcctatgggcccatcatcactgtctacctgcagcccacacccaaccccatgctgggaaccgtggtacaaattctcatgaatctggtaggaccaatgctgaaccctttgatctataccttgaggaataaggaagtaaaaacagccctgaaaacaatattgcacaggacaggccatgttcctgagagttag

SEQ ID NO: 226 - protein, 312 aa, Homo sapiens
MEVKNCCMVTEFILLGIPHTEGLEMTLFVLFLPFYACTLLGNVSILVAVMSSARLHTPMYFFLGNLSVFDMGFSSVTCPKMLLYLMGLSRLISYKDCVCQLFFFHFLGSIECFLFTVMAYDRFTAICYPLRYTVIMNPRICVALAVGTWLLGCIHSSILTSLTFTLPYCGPNEVDHFFCDIPALLPLACADTSLAQRVSFTNVGLISLVCFLLILLSYTRITISILSIRTTEGRRRAFSTCSAHLIAILCAYGPIITVYLQPTPNPMLGTVVQILMNLVGPMLNPLIYTLRNKEVKTALKTILHRTGHVPES

SEQ ID NO: 227 - DNA, 906 bp, Homo sapiens
  CDS (1)..(903)
atggaatttgttcttttggggttttctgatattcccaatctccactggatgctttttagtatatttttacttatgtatttgatgatcctgatgtgcaatggcatcataatactactaataaaaattcaccccgctctccagactcccatgtatttttttcttagcaatttttcccttttggaaatctgttatgtaacaatcattatcccaagaatgctcatggacatttggactcagaaaggaaatatttctttgtttgcttgtgctacacaaatgtgtttttttcttatgcttggaggcacggagtgtctccttctgacagtgatggcctatgaccgctacgtggctatttgtaagcctttgcagtatcctctagtgatgaaccacaaagtctgcattcagctgataatagcttcctggaccatcacaattcctgtagtaattggggaaacatgccaaattttccttttgcccttttgcggaactaacacaattaatcatttcttttgtgacatcccgccaatactcaagcttgcttgtggaaacatatttgtgaatgagataacagtccatgtagtagcggtggtgtttatcacggtgccatttctgttgattgttgtctcttatggcaaaattatctccaacattttgaaattgtcatcagccagaggaaaggctaaagccttctccacctgctcatctcacctaatagttgtaatcttattctttggagcaggtactatcacttatttacagcccaaaccacatcagtttcaaaggatggggaaactgatttctcttttctacaccattctgattccaactttgaatcctattatatataccctgaggaacaaagatatcatggtggcattgagaaaattactagctaagttattaacatga

SEQ ID NO: 228 - protein, 301 aa, Homo sapiens
MEFVLLGFSDIPNLHWMLFSIFLLMYLMILMCNGIIILLIKIHPALQTPMYFFLSNFSLLEICYVTIIIPRMLMDIWTQKGNISLFACATQMCFFLMLGGTECLLLTVMAYDRYVAICKPLQYPLVMNHKVCIQLIIASWTITIPVVIGETCQIFLLPFCGTNTINHFFCDIPPILKLACGNIFVNEITVHVVAVVFITVPFLLIVVSYGKIISNILKLSSARGKAKAFSTCSSHLIVVILFFGAGTITYLQPKPHQFQRMGKLISLFYTILIPTLNPIIYTLRNKDIMVALRKLLAKLLT

SEQ ID NO: 229 - DNA, 939 bp, Homo sapiens
  CDS (1)..(936)
atgagaggctggaatcatacaggtgcaaaggaattcctcctggtagggttaactgaaaatcctaatttgcagatcccactctttttgcttgtcactctgatttatttcatcactttgttggataatttgggtataattattttaatctggttaaatgcccaacttcatactccaatgtacttcttccttggcaacctctccttttgtgatatctgctactctactgtctttgctcctaagatgctagtcaatttcctatcaaaacataagtccagtacattttctggctgtgttctacagagtttcccttttgcagtatatgtaaccacaaaggacattctcctgtccatgatggcttatgaccattacgtggccatagctaatcccttgttgtatacagtcattatggcccaaaaagtttgtattcagatggtccttgcttcttacttaggtgggctcattaattccctgacacacacaataggtttgctcaaattagacttctgtggtcctaatattgtgaatcattatttctgtgatgttcctcctcttctgaggctttcttgctctgatgctcatatcaatgaaatgctgcccttggtcttctctgggctcattgcaatgttcactttcattgtcattatggtgtcttatatctgcatcatcattgccatccagagaatccatgcagctgagggaaggtacaaagccttctccacttgtgtctcccacctaaccacggtgaccttattctatgggtctgtttcttttagttatatccagccaagttctcagtattccttggaacaggagaaggtcttggctgtgttttatacactggtgatccccatgctaaacccacttatttatagcctgagaaataaggatgtaaaagatgcagccaaaaggttgatatggtgggggaaaaaccccacttga

SEQ ID NO: 230 - protein, 312 aa, Homo sapiens
MRGWNHTGAKEFLLVGLTENPNLQIPLFLLVTLIYFITLLDNLGIIILIWLNAQLHTPMYFFLGNLSFCDICYSTVFAPKMLVNFLSKHKSSTFSGCVLQSFPFAVYVTTKDILLSMMAYDHYVAIANPLLYTVIMAQKVCIQMVLASYLGGLINSLTHTIGLLKLDFCGPNIVNHYFCDVPPLLRLSCSDAHINEMLPLVFSGLIAMFTFIVIMVSYICIIIAIQRIHAAEGRYKAFSTCVSHLTTVTLFYGSVSFSYIQPSSQYSLEQEKVLAVFYTLVIPMLNPLIYSLRNKDVKDAAKRLIWWGKNPT

SEQ ID NO: 231 - DNA, 933 bp, Homo sapiens
  CDS (1)..(930)
atggactgggaaaattgctcctcattaactgatttttttctcttgggaattaccaataacccagagatgaaagtgaccctatttgctgtattcttggctgtttatatcattaatttctcagcaaatcttggaatgatagttttaatcagaatggattaccaacttcacacaccaatgtatttcttcctcagtcatctgtctttctgtgatctctgctattctactgcaactgggcccaagatgctggtagatctacttgccaagaacaagtcaatacccttctatggctgtgctctgcaattcttggtcttctgtatctttgcagattctgagtgtctactgctgtcagtgatggcctttgatcggtacaaggccatcatcaaccccctgctctatacagtcaacatgtctagcagagtgtgctatctactcttgactggggtttatctggtgggaatagcagatgctttgatacatatgacactggccttccgcctatgcttctgtgggtctaatgagattaatcatttcttctgtgatatccctcctctcttattactctcttgctcagatacacaggtcaatgagttagtgttattcaccgtctttggttttattgaactgagtaccatttcaggagttttcatttcttattgttatatcatcctatcagtcttggagatacactctgctgaggggaggttcaaagctctctctacatgcacttcccacttatctgcggttgcaattttccagggaactctgctctttatgtatttccggccaagttcttcctattctctagatcaagataaaatgacctcattgttttacacccttgtggttcccatgttgaaccccctgatttatagcctgaggaacaaggatgtgaaagaggccctgaaaaaactgaaaaatgaaattttattttaa

SEQ ID NO: 232 - protein, 310 aa, Homo sapiens
MDWENCSSLTDFFLLGITNNPEMKVTLFAVFLAVYIINFSANLGMIVLIRMDYQLHTPMYFFLSHLSFCDLCYSTATGPKMLVDLLAKNKSIPFYGCALQFLVFCIFADSECLLLSVMAFDRYKAIINPLLYTVNMSSRVCYLLLTGVYLVGIADALIHMTLAFRLCFCGSNEINHFFCDIPPLLLLSCSDTQVNELVLFTVFGFIELSTISGVFISYCYIILSVLEIHSAEGRFKALSTCTSHLSAVAIFQGTLLFMYFRPSSSYSLDQDKMTSLFYTLVVPMLNPLIYSLRNKDVKEALKKLKNEILF

SEQ ID NO: 233 - DNA, 981 bp, Homo sapiens
  CDS (1)..(978)
atgtcagggttgccttcagatatggatctatacaagcttcaattaaacaattttactgaagtcaccatgtttatattaataagcttcacagaagaatttgatgtgcaagtcttcctatttttattatttttagcaatctatctattcactctaataggcaatttagggctggttgtaccgatcattggggatttctggcttcacagcccaatgtactattttcttggtgttttatcattcttggatgtctgctattctacagttgtcactccaaaaatgttggtcaatttcctggcaaaaaataaatctatttcatttcttggatgtgcaacacagatgtttcttgcttgtacttttggaaccacagaatgctttctcttggctgcaatggcttatgatcgctatgtagccatctacaaccctctcctgtattcagtgagcatgtcacccagagtctatgtgccactcatcactgcttcctatgttgctagcattttacatgctactatacatacagtggctacatttagcctgtccttctgtggatccaatgaaattaggcatgtcttttgtaatatgcctcctctgcttgctatttcttgttctgacactcacgtaatccagcttctattcttctactttgtgggctctattgagatagtcactatcctgattgtcctgatctcctatggttttattctgttggccattctgaagatgcagtctgctgaagggaggagaaaagtcttctctacatgtggagctcacctaactggagtgacaatttatcatgggacaatcctcttcatgtatgtgagaccaagttccagctacacttcggacaatgacatgatagtgtcaatattttataccattgtgattcccatgctgaatcccatcatctacagtttgcggaacaaagatgtaaaggaggcaatcaaaagattgcttgtgagaaattggttcataaataagttatag

SEQ ID NO: 234 - protein, 326 aa, Homo sapiens
MSGLPSDMDLYKLQLNNFTEVTMFILISFTEEFDVQVFLFLLFLAIYLFTLIGNLGLVVPIIGDFWLHSPMYYFLGVLSFLDVCYSTVVTPKMLVNFLAKNKSISFLGCATQMFLACTFGTTECFLLAAMAYDRYVAIYNPLLYSVSMSPRVYVPLITASYVASILHATIHTVATFSLSFCGSNEIRHVFCNMPPLLAISCSDTHVIQLLFFYFVGSIEIVTILIVLISYGFILLAILKMQSAEGRRKVFSTCGAHLTGVTIYHGTILFMYVRPSSSYTSDNDMIVSIFYTIVIPMLNPIIYSLRNKDVKEAIKRLLVRNWFINKL

SEQ ID NO: 235 - DNA, 939 bp, Homo sapiens
  CDS (1)..(936)
atgatgggtagaaggaatgacacaaatgtggctgacttcatccttacgggactgtcagactctgaagaggtccagatggctctgtttatgctatttctcctcatatacctaattactatgctggggaatgtggggatgctattgataatccgcctggacctccagcttcacactcccatgtattttttccttactcacctgtcatttattgacctcagttactcaactgtcgtcacacctaaaaccttagcgaacttactgacttccaactatatttccttcacgggctgctttgcccagatgttctgttttgtcttcttgggtactgctgaatgttatcttctctcctcaatggcctatgatcgctatgcagcgatctgcagtcctctacactacacagttattatgtccaaaaggctctgcctcgctctcatcactgggccttatgtgattggctttatggactcctttgtcaatgtggtttccatgagcagattgcatttctgtgactcaaacataattcatcactttttctgtgacacttccccaattttagctctgtcctgcactgacacagacaacactgaaatgctgatattcattatcgctggttccaccctgatggtgtcccttatcacaatatctgcatcctatgtgtccattctctctaccatcctgaaaattaattccacttcaggaaagcagaaagctttctctacttgcgtctctcatctcttgggagtcaccatcttctatggaactatgatttttacttacttaaagccaagaaagtcttattccttgggaagagatcaagtggctcctgtgttttatactattgtgattcccatgctgaatccactcatttatagtcttagaaacagagaagtgaaaaatgctctcattagagtcatgcagagaagacaggactccaggtag

SEQ ID NO: 236 - protein, 312 aa, Homo sapiens [sequence omitted]

SEQ ID NO: 237 - DNA, 924 bp, Homo sapiens
  CDS (1)..(921)
atgggccaacacaatctaacagtgctaactgaattcattctgatggaactcacaaggcggcctgagctgcagattcccctttttggagtcttcctcgtcatctacctaatcacagtggtgggcaacctaactatgatcattttgaccaaactggactcccacttacatacacctatgtacttttctatcagacatttggcttttgttgatcttggtaattctactgtcatttgtcccaaggtgctggcaaattttgttgtggatcgaaatactatttcctattatgcatgtgctgcacagctggcattcttccttatgttcattatcagtgaatttttcatcctgtcagccatggcctatgaccgctatgtggccatttgtaaccctctgctctattatgttattatgtctcagcgactgtgtcatgtactggtgggcattcaatatctctacagcacatttcaggctctgatgttcactattaagatttttacattgaccttctgtggctctaatgtcatcagtcatttttactgtgatgatgttcctttgctacctatgctttgctcaaatgcacaggaaatagaattgttgagcatactattttctgtatttaatttgatctcctcctttctgatagtcttagtgtcctacatgttgattttgttagctatatgtcaaatgcattctgcagagggcaggaaaaaggctttctccacatgtggttcccatttgacagtggtggttgtgttctatgggtctctactcttcatgtacatgcagcccaattccactcacttctttgatactgataaaatggcttctgtgttttacactttagtaatccccatgcttaaccctttgatttacagcttaagaaacgaagaggtgaaaaatgccttctataagctctttgagaattga

SEQ ID NO: 238 - protein, 307 aa, Homo sapiens
MGQHNLTVLTEFILMELTRRPELQIPLFGVFLVIYLITVVGNLTMIILTKLDSHLHTPMYFSIRHLAFVDLGNSTVICPKVLANFVVDRNTISYYACAAQLAFFLMFIISEFFILSAMAYDRYVAICNPLLYYVIMSQRLCHVLVGIQYLYSTFQALMFTIKIFTLTFCGSNVISHFYCDDVPLLPMLCSNAQEIELLSILFSVFNLISSFLIVLVSYMLILLAICQMHSAEGRKKAFSTCGSHLTVVVVFYGSLLFMYMQPNSTHFFDTDKMASVFYTLVIPMLNPLIYSLRNEEVKNAFYKLFEN

SEQ ID NO: 239 - DNA, 939 bp, Homo sapiens
  CDS (1)..(936)
atggctgatgataattttacagttgtcactgagtttattcttttgggattgacagatcatgctgaactaaaagctgtgctttttgtggtgttcctggtgatttacgccattaccttgttgaggaatctgggcatgatcctcttaatccaaatcacctccaaactccacacacccatgtactttttactcagctgtctttcatttgtggatgcctgctattcatctgcaattgcacccaaaatgctggtgaacctcctggttgtgaaggcaacaatttctttctctgcttgcatggtacagcatttgtgtttcggagtgttcatcaccacagaaggcttcttactgtcagtgatggcctatgaccgctatgtggccattgtgagtcccttgctttacactgtagccatgtctgatagaaagtgtgtggagcttgtcacaggatcatggataggtggaatagttaacacattaatccacacaatcagcttgaggagactgtccttttgtaggctaaatgctgtcagccacttcttctgtgacattccttcactgctaaagctgtcatgttctgacacctccatgaatgagttgttgctgttaaccttctccggagtcattgccatggccaccttcttgactgtgatcatttcctacatcttcattgcttttgctagcctaaggatccactcagcatcaggcagacagcaagccttctccacctgtgcctctcacctgactgctgtgaccatattctatggtaccttaatctttagctacattcagccaagctcccagtattttgtggaacaagagaaagtggtttctatgttctatacgctagggattcccatgttaaacctgttgatacacagtttgagaaacaaggacgtaaaggaggcagtgaaaagggccatagaaatgaaacatttcctctgttaa

SEQ ID NO: 240 - protein, 312 aa, Homo sapiens
MADDNFTVVTEFILLGLTDHAELKAVLFVVFLVIYAITLLRNLGMILLIQITSKLHTPMYFLLSCLSFVDACYSSAIAPKMLVNLLVVKATISFSACMVQHLCFGVFITTEGFLLSVMAYDRYVAIVSPLLYTVAMSDRKCVELVTGSWIGGIVNTLIHTISLRRLSFCRLNAVSHFFCDIPSLLKLSCSDTSMNELLLLTFSGVIAMATFLTVIISYIFIAFASLRIHSASGRQQAFSTCASHLTAVTIFYGTLIFSYIQPSSQYFVEQEKVVSMFYTLGIPMLNLLIHSLRNKDVKEAVKRAIEMKHFLC

SEQ ID NO: 241 - DNA, 936 bp, Homo sapiens
  CDS (1)..(933)
atggtgtgggaaaaccagaccttcaactccatcttcatcctgctgggaatcttcaatcacagtcccacccacaccttccttttttctctggtcctgggcatcttctcactggcattgatggaaaatatttccatggttctcctcatctacatagagaaacagctccacacccccatgtacttcctcctcagtcaactgtcccttatggacctcatgctcatctgcaccactctacccaagatgatcttcagctacttgtctgggaagaaatctatctctctggcaggttgtggaactcagatattcttctatgtgtccctgcttggagctgaatgtttcttgttggctgtcatggcttatgaccgctatgtggctatatgtcaccctcttcagtacaccatcctcatgaatccgaaactctgtgtcttcatgactgttgcttcctggaccttggggtctcttgatgggatcatagtgcttgcagctgtcctgtcattttcttactgcagctctctggaaattcatcactttttctgtgatgttgctgcccttttacctctatcctgcacagaaacatctgcatttgaaagactacttgtcatttgttgtgtggtaatgctaatctttccagtttcagttatcatactttcctattcccatgtccttcgagccgtcatccacatgggctctggggaaagtcgtcgcaaggccttcactacctgctcctcccacctgtctgtggtcggactctactacggtgctgctatgttcatgtacatgagaccagcttctaaacatacgccagaccaggacaagatggtgtcggccttctacactattctcacccctatgctgaaccctctcatttatagcctccgcaacaaagaagtgttcagggcactacagaaggtactgaagaaaagaaagttaatatga

SEQ ID NO: 242 - protein, 311 aa, Homo sapiens
MVWENQTFNSIFILLGIFNHSPTHTFLFSLVLGIFSLALMENISMVLLIYIEKQLHTPMYFLLSQLSLMDLMLICTTLPKMIFSYLSGKKSISLAGCGTQIFFYVSLLGAECFLLAVMAYDRYVAICHPLQYTILMNPKLCVFMTVASWTLGSLDGIIVLAAVLSFSYCSSLEIHHFFCDVAALLPLSCTETSAFERLLVICCVVMLIFPVSVIILSYSHVLRAVIHMGSGESRRKAFTTCSSHLSVVGLYYGAAMFMYMRPASKHTPDQDKMVSAFYTILTPMLNPLIYSLRNKEVFRALQKVLKKRKLI

SEQ ID NO: 243 - DNA, 939 bp, Homo sapiens
  CDS (1)..(936)
atggcaagggagaattcgaccttcaactccgacttcatcctcctgggaatcttcaatcacagccccacccacaccttcctcttctttctggtcctggccatcttttcagtggccttcatgggaaactctgtcatggttctcctcatctacctggacacccagctccacacccccatgtacctcctcctcagccaactgtccctcatggacctcatgctcatctgcaccaccgtacccaagatggccttcaactacctgtctggcagcaagtccatttctatggctggttgtgccacacaaattttcttctatacatcactgcttggctctgagtgctttcttttggctgttatggcttatgaccgctacactgccatttgccaccctctaagatacaccaatctcatgagccctaaaatttgtggacttatgactgccttttcctggatcctgggctctacggatggaattattgatgttgtagcaacattttccttctcctactgtgggtctcgggaaatagcccacttcttctgtgacttcccctccctactaatcctctcatgcagtgacacatcaatatttgaaaagattcttttcatctgctgtatagtaatgattgttttccctgttgcaatcatcattgcttcctatgctcgagttatcctggctgtcattcacatgggatctggagagggtcgtcgcaaagcttttactacttgttcctctcacctcttggtggtgggaatgtactatggagcagctttgttcatgtacatacggcccacatctgatcgctccccaacacaggacaagatggtgtctgtattctacaccatcctcactcccatgttgaatcccctcatctacagcctccgcaacaaggaggtgaccagagcattcatgaagatcttaggaaagggcaagtctggagagtga

SEQ ID NO: 244 - protein, 312 aa, Homo sapiens
MARENSTFNSDFILLGIFNHSPTHTFLFFLVLAIFSVAFMGNSVMVLLIYLDTQLHTPMYLLLSQLSLMDLMLICTTVPKMAFNYLSGSKSISMAGCATQIFFYTSLLGSECFLLAVMAYDRYTAICHPLRYTNLMSPKICGLMTAFSWILGSTDGIIDVVATFSFSYCGSREIAHFFCDFPSLLILSCSDTSIFEKILFICCIVMIVFPVAIIIASYARVILAVIHMGSGEGRRKAFTTCSSHLLVVGMYYGAALFMYIRPTSDRSPTQDKMVSVFYTILTPMLNPLIYSLRNKEVTRAFMKILGKGKSGE

SEQ ID NO: 245 - DNA, 963 bp, Homo sapiens
  CDS (1)..(960)
atggagatgagaaatactaccccagattttattctcctaggactctttaaccacaccagagcccaccaagtcctcttcatgatgcttctggccaccgttttgacctccctgtttagcaatgccctcatgattctcctgattcactgggaccaccggctccacaggcccatgtacttcctcctgagccaactttccctcatggacatgatgctggtttccaccactgtgcccaaaatggcggctgactacttgaccggaaataaggccatctcccgcgctggctgtggtgtgcagatcttcttcctccccacactgggtggtggagagtgcttcctcttagcagccatggcctatgaccgctatgcggctgtctgccacccactccgatatcccactctcatgagctggcagctgtgcctgaggatgaccatgtcgtcctggctcctgggtgcagctgacggcctcctgcaggctgttgctaccctgagcttcccatattgcggtgcacacgagatcgatcacttcttctgcgaggcccccgtgttggtgcgtttggcttgtgctgacacttcagtcttcgaaaacgccatgtacatctgctgtgtgttaatgctcctggtccccttttccctcatcctgtcctcctatggtctcatcctcgctgctgttctgctcatgcgctctacagaagcccgcaagaaggcctttgccacctgctcttcacatgtggctgtggtgggactcttttatggagctggcatttttacctatatgagacccaaatcccacaggtccactaaccacgataaggttgtgtcagccttctatactatgttcacccctttactaaatcccctcatctacagtgtgaggaacagtgaggtcaaggaagccctgaaacggtggctggggacgtgtgtaaacctaaaacaccagcaaaatgaggcccacaggtcaagatga

SEQ ID NO: 246 - protein, 320 aa, Homo sapiens
MEMRNTTPDFILLGLFNHTRAHQVLFMMLLATVLTSLFSNALMILLIHWDHRLHRPMYFLLSQLSLMDMMLVSTTVPKMAADYLTGNKAISRAGCGVQIFFLPTLGGGECFLLAAMAYDRYAAVCHPLRYPTLMSWQLCLRMTMSSWLLGAADGLLQAVATLSFPYCGAHEIDHFFCEAPVLVRLACADTSVFENAMYICCVLMLLVPFSLILSSYGLILAAVLLMRSTEARKKAFATCSSHVAVVGLFYGAGIFTYMRPKSHRSTNHDKVVSAFYTMFTPLLNPLIYSVRNSEVKEALKRWLGTCVNLKHQQNEAHRSR

SEQ ID NO: 247 - DNA, 939 bp, Homo sapiens
  CDS (1)..(936)
atggcatgggagaatcagaccttcaactctgacttcctcctcctgggaatcttcaatcatagccccacccacaccttcctcttctttctggtcctggccatcttttcagtggccttcatgggaaactccatcatggttctcctcatctacctggatacccagctccacacccccatgtacttcctcctcagccaactgtccctcatggacctcatgctcatctgcaccactgtacccaagatggccttcaactacttgtctggcagcaagtccatttctatggctggctgtgccacacaaattttcttctatatatcattgcttggctccgaatgctttctgttggctgttatgtcttatgaccgctacactgccatttgccaccctctaagatacaccaatctcatgagacccaaaatttgtggacttatgactgccttctcctggatcctgggctctacagatggaatcattgatgctgtagcgacattttccttctcctactgtgggtctcgggaaatagcccacttctgctgtgacttcccttccctactaatcctctcatgcaatgacacatcaatatttgaagaggttattttcatctgctgtatagtaatgcttgttttccctgttgcaatcatcatcacttcctatgctcgagttattctggctgtcattcacatgggatctggagagggacgtcgcaaagcttttactacttgttcctctcacctcatggtggtgggaatgtactatggagcaggtttgttcatgtgcattcagcccacatctcatcattctcctatgcaggacaagatggtgtctgtattctacaccatcgtcactcccatgctgaatcctctcatttatagcctccgcaacaaggaagtgaccagagcattaatgaaaatcttaggaaagggcaagtctggagattga

SEQ ID NO: 248 - protein, 312 aa, Homo sapiens
MAWENQTFNSDFLLLGIFNHSPTHTFLFFLVLAIFSVAFMGNSIMVLLIYLDTQLHTPMYFLLSQLSLMDLMLICTTVPKMAFNYLSGSKSISMAGCATQIFFYISLLGSECFLLAVMSYDRYTAICHPLRYTNLMRPKICGLMTAFSWILGSTDGIIDAVATFSFSYCGSREIAHFCCDFPSLLILSCNDTSIFEEVIFICCIVMLVFPVAIIITSYARVILAVIHMGSGEGRRKAFTTCSSHLMVVGMYYGAGLFMCIQPTSHHSPMQDKMVSVFYTIVTPMLNPLIYSLRNKEVTRALMKILGKGKSGD

SEQ ID NO: 249 - DNA, 963 bp, Homo sapiens
  CDS (1)..(960)
atggagatgagaaatactaccccagattttattctcctaggactctttaaccacaccagagcccaccaagtcctcttcatgatggttctgagtatcgttttgacctccctgtttggcaattccctcatgattctcctgattcactgggaccaccggctccacacgcccatgtacttcctcctgagccaactttccctcatggacatgatgctggtttccaccactgtgcccaaaatggcggctgactacttgaccggaagtaaggccatctcccgcgctggctgtggtgtgcagatcttcttcctccccacactgggtggtggagagtgcttcctcttagcagccatggcctatgaccgctatgcggctgtctgccacccactccgatatcccactctcatgagctggcagctgtgcctgaggatgaccatgtcgtgttggctcctgggtgcagctgacgggctcctgcaggctgttgttaccctgagcttcccatattgtggtgcacacgagatcgatcacttcttctgcgagacccccgtgctggtgcgtttggcttgtgctgacacttcagtcttcgaaaacgccatgtacatctgctgtgtgttaatgctcctggtccccttttccctcatcctgtcctcctatggtctcatcctcgctgctgttctgcacatgcgctctacagaagcccgcaagaaggcctttgccacctgctcttcacatgtggctgtggtgggactcttttatggagctgccatttttacctatatgagacccaaatcccataggtccactaaccatgacaaggttgtgtcagccttctatactatgttcacccctttactaaaccccctcatctacagtgtgaagaacagtgaggtgaagggagccctgaaacggtggctggggacgtgtgtaaacataaaacaccagcaaaatgaggcccacaggtcaagatga

SEQ ID NO: 250 - protein, 320 aa, Homo sapiens
MEMRNTTPDFILLGLFNHTRAHQVLFMMVLSIVLTSLFGNSLMILLIHWDHRLHTPMYFLLSQLSLMDMMLVSTTVPKMAADYLTGSKAISRAGCGVQIFFLPTLGGGECFLLAAMAYDRYAAVCHPLRYPTLMSWQLCLRMTMSCWLLGAADGLLQAVVTLSFPYCGAHEIDHFFCETPVLVRLACADTSVFENAMYICCVLMLLVPFSLILSSYGLILAAVLHMRSTEARKKAFATCSSHVAVVGLFYGAAIFTYMRPKSHRSTNHDKVVSAFYTMFTPLLNPLIYSVKNSEVKGALKRWLGTCVNIKHQQNEAHRSR

SEQ ID NO: 251 - DNA, 933 bp, Homo sapiens
  CDS (1)..(930)
atggaccctggaaaccattcctcagtgactgagtccattctggctgggctctcagaacagccagagctccagctgcgcctcttcctcctgttcttaggaatctgtgtggtcacagtggtgggcaacttgggcatgatcacactgattgggctcagttctcacctgcacacacctatgtactatttcctcagcagtctgtccttcattgacttctgccattccactgtcattacccctaagatgctggtgaactttgcgacagagaagaacatcatctcctaccctgaatgcatggctcagctctatttattcagtatttttgctattgcagagtgtcacatgttggctgcaatggcgtatgactgttatgttgccatctgcagccccttgctgtacaatgtcatcatgtcctatcaccgctgcttctggctcacagtgggagtttacattttaggcatccttggatctacaattcataccagttttatgttgagactctttttgtgcaagactaatgtgattaaccattatttttgtgatcttttccctctcttggggctctcctgctccagcacctacatcaatgaattactggttctggtcttgagtgcatttaacatcctgatgcctgccttaaccatccttgcttcttacatctttatcattgccagcatcctccgcattcactccactgagggcaggtccaaagcctttagcacttgcagctcccacatcttggctgttgctgttttctttggatctgcagcattcatgtacctgcagccatcatctgtcagctccatggaccagaggaaagtgtcgtctgtgttttatactactattgtgcccatgctgaaccccctgatctacagcctgaggaataaagatgtcaaacttgccgtgaagaaaattctgcatcagacagcatgttaa

SEQ ID NO: 252 - protein, 310 aa, Homo sapiens
MDPGNHSSVTESILAGLSEQPELQLRLFLLFLGICVVTVVGNLGMITLIGLSSHLHTPMYYFLSSLSFIDFCHSTVITPKMLVNFATEKNIISYPECMAQLYLFSIFAIAECHMLAAMAYDCYVAICSPLLYNVIMSYHRCFWLTVGVYILGILGSTIHTSFMLRLFLCKTNVINHYFCDLFPLLGLSCSSTYINELLVLVLSAFNILMPALTILASYIFIIASILRIHSTEGRSKAFSTCSSHILAVAVFFGSAAFMYLQPSSVSSMDQRKVSSVFYTTIVPMLNPLIYSLRNKDVKLAVKKILHQTAC

SEQ ID NO: 253 - DNA, 936 bp, Homo sapiens
  CDS (1)..(936)
atggcagcagaaaaccattcttttgtgactaagtttattctggttgggctaacagagaagtcagagctacagctgcccctcttcctcgtcttcctgggaatctatgtagtcacagtgctggggaacctgggcatgatcacactgattgggctcagttctcacctgcacacacctatgtactgtttcctcagcagtctgtccttcattgacttctgccattccactgtcattacccctaagatgctggtgaactttgtgacagagaagaacatcatctcctaccctgaatgcatgactcagctctacttcttcctcgtttttgctattgcagagtgtcacatgttggctgcaatggcatatgacggctacgtggccatctgtagccccttgctgtacagcatcatcatatccaataaggcttgcttttctctgattttagtggtgtatgtaataggcctgatttgtgcgtcagctcatataggctgtatgtttagggttcaattctgcaaatttgatgtgatcaaccattatttctgtgatcttatttctatcttgaagctctcctgttctagtacttacattaatgagttactgattttaatctttagtggaattaacatccttgtccccagcctgaccatcctcagctcttacatcttcatcattgccagcatcctccgcattcgctacactgagggcaggtccaaagccttcagcacttgcagctcccacatctcggctgtttctgttttctttgggtctgcagcattcatgtacctgcagccatcatctgtcagctccatggaccaggggaaagtgtcctctgtgttttatactattgttgtgcccatgctgaaccccctgatctacagcctgaggaataaagatgtccacgttgccctgaagaaaacgctagggaaaagaacattcttatga

SEQ ID NO: 254 - protein, 311 aa, Homo sapiens
MAAENHSFVTKFILVGLTEKSELQLPLFLVFLGIYVVTVLGNLGMITLIGLSSHLHTPMYCFLSSLSFIDFCHSTVITPKMLVNFVTEKNIISYPECMTQLYFFLVFAIAECHMLAAMAYDGYVAICSPLLYSIIISNKACFSLILVVYVIGLICASAHIGCMFRVQFCKFDVINHYFCDLISILKLSCSSTYINELLILIFSGINILVPSLTILSSYIFIIASILRIRYTEGRSKAFSTCSSHISAVSVFFGSAAFMYLQPSSVSSMDQGKVSSVFYTIVVPMLNPLIYSLRNKDVHVALKKTLGKRTFL
